(19) United States
(12) Patent Application Publication
(10) Pub. No.: US 2025/0327054 A1
(43) Pub. Date: Oct. 23, 2025

(54) REPROGRAMMABLE ISRB NUCLEASES AND USES THEREOF

(71) Applicants: THE BROAD INSTITUTE, iNC., Cambridge, MA (US); MASSACHUSETTS INSTITUTE OF TECHNOLOGY, Cambridge, MA (US)

(72) Inventors: Feng Zhang, Cambridge, MA (US); Han Altae-Tran, Cambridge, MA (US); Soumya Kannan, Cambridge, MA (US)

(21) Appl. No.: 18/711,704

(22) PCT Filed: Nov. 22, 2022
(86) PCT No.: PCT/US2022/080340

§ 371 Date: May 20, 2024

Related U.S. Application Data
(60) Provisional application No. 63/282,575, filed on Nov. 23, 2021.
(60) Provisional application No. 63/351,659, filed on Jun. 13, 2022.

(51) Int. Cl. C12N 9/78; C12N 9/22; C12N 15/11; C12N 15/90

(52) U.S. Cl. CPC C12N 9/78; C12N 9/226; C12N 15/111; C12N 15/902; C12N 2310/20; C12Y 305/04004; C12Y 305/04005

(57) ABSTRACT

Systems, methods and compositions for targeting polynucleotides are detailed herein. In particular, engineered DNA-targeting systems comprising IsrB polypeptides, novel IsrB nucleases and reprogrammable targeting nucleic acid components and methods and application of use are provided.

### CROSS-REFERENCE TO RELATED APPLICATIONS

[0001] Reference is made to U.S. Provisional Application No. 63/282,575, filed Nov. 23, 2021; and U.S. Provisional Application No. 63/351,659, filed Jun. 13, 2022; the contents of which are incorporated by reference in their entireties herein.

### STATEMENT AS TO FEDERALLY SPONSORED RESEARCH

[0002] This invention was made with government support under Grant Nos. HL141201 and HG009761 awarded by The National Institutes of Health. The government has certain rights in the invention.

### REFERENCE TO AN ELECTRONIC SEQUENCE LISTING

[0003] This application contains a sequence listing filed in electronic form as an xml file entitled BROD-5480WP_ST26.xml, created on Nov. 21, 2022 and having size of 2,154,082 bytes. The contents of the electronic sequence listing are herein incorporated by reference in their entirety.

### TECHNICAL FIELD

[0004] The subject matter disclosed herein is generally directed to systems, methods and compositions used for targeted gene modification and nucleic acid editing utilizing systems comprising Isc polypeptides. In particular, the present disclosure provides DNA or RNA-targeting compositions comprising novel DNA or RNA-targeting nucleases and at least one targeting nucleic acid component.

### BACKGROUND

[0005] While there are genome-editing techniques available for producing targeted genome perturbations, there remains a pressing need for new and alternative genome engineering technologies that employ robust novel strategies and molecular mechanisms and are affordable, easy to set up, scalable, and amenable to targeting multiple positions within the genome. The CRISPR-Cas systems of bacterial and archaeal adaptive immunity are some such systems that show extreme diversity of protein composition and genomic loci architecture. These additional desirable tools in genome engineering and biotechnology would further advance the art.

[0006] Citation or identification of any document in this application is not an admission that such a document is available as prior art to the present invention.

### SUMMARY

[0007] In certain example embodiments, provided herein is a non-naturally occurring, engineered composition comprising a) an IsrB polypeptide comprising a split Ruv-C nuclease domain comprising RuvC-I, RuvC-II, and RuvC-III subdomains, and b) an ωRNA molecule comprising a scaffold and a reprogrammable spacer sequence, the ωRNA molecule capable of forming a complex with the IsrB polypeptide and directing the IsrB polypeptide to a target polynucleotide. In an embodiment, provided herein is a composition wherein the IsrB polypeptide comprises a PLMP domain (SEQ ID NO: 1524) and optionally a conserved C-terminal Y domain. In an embodiment, provided herein is a composition wherein the IsrB polypeptide comprises about 170 to about 700 amino acids. In an embodiment, provided herein is a composition wherein the reprogrammable spacer sequence comprises a spacer of 10 nucleotides (nt) to 150 nucleotides in length, preferably 12 to 50 nt, more preferably 15 and 45 nt in length.

[0008] In an embodiment, provided herein is a composition wherein the target sequence comprises a target adjacent motif (TAM) sequence 3′ of the target polynucleotide. In an embodiment, provided herein is a composition wherein the target polynucleotide is DNA.

[0009] In an embodiment, provided herein is a composition wherein the ωRNA further comprises an aptamer.

[0010] In an embodiment, provided herein is a composition wherein the ωRNA molecule further comprises an extension to add an RNA template.

[0011] In an embodiment, provided herein is a composition further comprising a functional domain associated with the IsrB protein.

[0012] In certain example embodiments, provided herein is a composition wherein the functional domain has transposase activity, methylase activity, demethylase activity, translation activation activity, translation repression activity, transcription activation activity, transcription repression activity, transcription release factor activity, chromatin modifying or remodeling activity, histone modification activity, nuclease activity, single-strand RNA cleavage activity, double-strand RNA cleavage activity, single-strand DNA cleavage activity, double-strand DNA cleavage activity, nucleic acid binding activity, detectable activity, or any combination thereof.

[0013] In a certain embodiment, provided herein is a composition further comprising a serine or tyrosine recombinase or integrase.

[0014] In an embodiment, provided herein is a composition further comprising a homologous recombination donor template comprising a donor sequence for insertion into a target polynucleotide.

[0015] In embodiments, provided herein is a vector system comprising one or more vectors encoding the IsrB polypeptide and the ωRNA molecule disclosed herein above.

[0016] In embodiments, provided herein is an engineered cell comprising the composition disclosed herein above.

[0017] In certain example embodiments, provided herein is a method of modifying a target polynucleotide sequence in a cell, comprising introducing to the cell the composition disclosed herein above. In an embodiment, is disclosed a method wherein the polypeptide and/or nucleic acid components are provided via one or more polynucleotides encoding the polypeptides and/or nucleic acid component(s), and wherein the one or more polynucleotides are operably configured to express the IsrB polypeptide and/or the ωRNA molecule. IN an embodiment, provided herein is a method wherein the modifying comprises cleaving a DNA polynucleotide.

[0018] In certain example embodiments, provided herein is a composition comprising an IsrB protein, wherein the IsrB protein comprises an N-terminal X domain, a RuvC domain, a Bridge Helix domain, and a C-terminal Y domain. In an embodiment, provided herein is a composition wherein the X domain is no more than 50 amino acids in length. In certain embodiments, provided herein is a composition wherein the IsrB protein is no more than 500, no more than 600, no more than 700, or no more than 800 amino acids in length. In an embodiment, provided herein is a composition wherein the Ruv-C domain of the IsrB protein is catalytically inactive. In an embodiment, provided herein is a composition wherein the nuclease domain has nickase activity or is engineered to have nickase activity.

[0019] In an embodiment, provided herein is a composition further comprising a homologous recombination donor template comprising a donor sequence for insertion into a target polynucleotide.

[0020] In embodiments, provided herein are one or more polynucleotides encoding one or more components of the composition as disclosed herein above.

[0021] In embodiments, provided herein are one or more vectors comprising the one or more polynucleotides as disclosed herein above.

[0022] In embodiments, provided herein is a cell or progeny thereof genetically engineered to express one or more components of the compositions as disclosed herein above.

[0023] In certain embodiments, provided herein is a method of targeting a polynucleotide comprising contacting a sample that comprises a target polynucleotide with the composition as disclosed herein above or the one or more polynucleotides or one or more vectors as disclosed herein above.

[0024] In certain embodiments, provided herein is a method wherein contacting results in modification of a gene product or modification of the amount or expression of a gene product.

[0025] In certain embodiments, provided herein is a method wherein the target sequence of the polynucleotide is a disease-associated target sequence.

[0026] In certain example embodiments, provided herein is an engineered, non-naturally occurring composition comprising: a) the IsrB protein as disclosed herein above, wherein the IscB protein is catalytically inactive, b) a nucleotide deaminase associated with or otherwise capable of forming a complex with the IsrB protein, and c) an ωRNA molecule capable of forming a complex with the IsrB protein and directing site-specific binding at a target sequence. In an embodiment, provided herein is a composition wherein the nucleotide deaminase is an adenosine deaminase or a cytidine deaminase. In embodiments, provided herein are polynucleotides encoding one or more components of the composition as disclosed herein above. In embodiments, provided herein are one or more vectors encoding the one or more polynucleotides as disclosed herein above.

[0027] In embodiments, provided herein is a cell or progeny thereof genetically engineered to express one or more components of the composition as disclosed herein above.

[0028] In certain example embodiments, provided herein is a method of editing nucleic acids in target polynucleotides comprising delivering the composition as disclosed herein above, the one or more polynucleotides as disclosed herein above, or one or more vectors as disclosed herein above to a cell or population of cells comprising the target polynucleotides. In an embodiment, provided herein is a method wherein the target polynucleotides are target sequences within genomic DNA. In an embodiment, provided herein is a method wherein the target polynucleotide is edited at one or more bases to introduce a G→A or C→T mutation. In an embodiment, provided herein is an isolated cell or progeny thereof comprising one or more base edits made using the method as disclosed herein above.

[0029] In certain example embodiments, provided herein is an engineered, non-naturally occurring composition comprising: a) the IsrB protein as disclosed herein above, wherein the IsrB is catalytically inactive, b) a reverse transcriptase associated with or otherwise capable of forming a complex with the IscrB protein, and c) ωRNA molecule capable of forming a complex with the IsrB protein and directing site-specific binding of the complex to a target sequence of a target polynucleotide, and further comprising a donor sequence for insertion into the target polynucleotide. In an embodiment, provided herein are one or more polynucleotides encoding one or more components of the composition as disclosed herein above. In an embodiment, provided herein are vectors encoding the one or more polynucleotides as disclosed herein above.

[0030] In certain example embodiments, provided herein is a method of modifying target polynucleotides comprising: delivering the composition as disclosed herein above, the one or more polynucleotides as disclosed herein above, or one or more vectors as disclosed herein above to a cell or population of cells comprising the target polynucleotides, wherein the complex directs the reverse transcriptase to the target sequence and the reverse transcriptase facilitates insertion of the donor sequence from the ωRNA molecule into the target polynucleotide.

[0031] In certain example embodiments, provided herein is a method wherein insertion of the donor sequence: a) introduces one or more base edits; b) corrects or introduces a premature stop codon; c) disrupts a splice site; d) inserts or restores a splice site; e) inserts a gene or gene fragment at one or both alleles of the target polynucleotide; or f) a combination thereof.

[0032] In an embodiment, provided herein is an isolated cell or progeny thereof comprising modifications made using the method as disclosed herein above.

[0033] In certain example embodiments, provided herein is an engineered, non-naturally occurring composition comprising: a) the IsrB protein as disclosed in Table 1; b) a non-LTR retrotransposon protein or integrase associated with or otherwise capable of forming a complex with the IsrB protein; c) ωRNA molecule capable of forming a complex with the IsrB protein and directing site-specific binding to a target sequence of a target polynucleotide; and d) a donor construct comprising a donor polynucleotide for insertion to the target polynucleotide and located between two binding elements capable of forming a complex with the non-LTR retrotransposon protein or integrase. In an embodiment, provided herein is a composition wherein the IsrB protein is fused to the N-terminus of the non-LTR retrotransposon protein or integrase. In an embodiment, provided herein is a composition wherein the IsrB protein has nickase activity.

[0034] In an embodiment, provided herein is a composition wherein the donor polynucleotide further comprises a polymerase processing element to facilitate 3′ end processing of the donor polynucleotide sequence.

[0035] In an embodiment, provided herein is a composition wherein the donor polynucleotide further comprises a homology region to the target sequence on the 5′ end of the donor construct, the 3′ end of the donor construct, or both.

[0036] In an embodiment, provided herein are one or more polynucleotides encoding one or more components of the composition as disclosed herein above.

[0037] In an embodiment, provided herein are one or more vectors comprising the one or more polynucleotides as disclosed herein above.

[0038] In a certain example embodiment, provided herein is a method of modifying target polynucleotides comprising: delivering the composition as disclosed herein above, the one or more polynucleotides as disclosed herein above, or the one or more vectors as disclosed herein above to a cell or population of cells comprising the target polynucleotides, wherein the complex directs the non-LTR retrotransposon protein to the target sequence and the non-LTR retrotransposon protein facilitates insertion of the donor polynucleotide sequence from the donor construct into the target polynucleotide.

[0039] In certain example embodiments, provided herein is a method wherein the insertion of the donor sequence: a) introduces one or more base edits; b) corrects or introduces a premature stop codon; c) disrupts a splice site; d) inserts or restores a splice site; e) inserts a gene or gene fragment at one or both alleles of the target polynucleotide; or; f) a combination thereof.

[0040] In an embodiment, provided herein is an isolated cell or progeny thereof comprising the modifications made using the method as disclosed herein above.

### BRIEF DESCRIPTION OF THE DRAWINGS

[0041] An understanding of the features and advantages of the present invention will be obtained by reference to the following detailed description that sets forth illustrative embodiments, in which the principles of the invention may be utilized, and the accompanying drawings of which:

[0042] FIG. 1—PLMP Domain. Weblogo of PLMP domain found in IscB and IsrB proteins immediately upstream of the RuvC-I domain.

[0043] FIG. 2—Small RNA-seq of standalone ωRNAs in K. racemifer. Small RNA-seq reads greater than 200 bp mapped to standalone ωRNA loci in K. racemifer. 9 of the 10 loci contain an expressed ncRNA transcript corresponding to a guide and ωRNA scaffold. The ωRNA scaffold that is not expressed belongs to a group associated primarily with IsrB (G1c group—see FIG. 15).

[0044] FIG. 3—Complete RuvC/BH phylogenetic analysis with IQ Tree 2. Maximum likelihood phylogenetic analysis of all IsrB, IscB and Cas9 RuvC/BH domains using IQ Tree 2. The LG substitution model with Gamma rates with 4 categories was used with 5000 ultra fast bootstraps (with hill-climbing nearest neighbor change for each bootstrap tree). The tree was rooted on the IsrB family. Associations are calculated for each cluster based on non-redundant loci (at 90% sequence identity of the main locus ORF). Ga-Gi refer to the IscB/IsrB main ωRNA profiles in FIG. 15. HNH domain associations are shown with 3 colors, with cyan indicating the HNH domain has the H, N, and H catalytic residues, magenta indicating the HNH domain has the H, N, and N catalytic residues, and grey indicating that the HNH domain has an H, N, and not H/N catalytic residues. Sizes of REC-like insertion in the representative protein sequence for each cluster are shown as determined by the number of amino acids between the BH and the RuvC-II in the alignment. Total size of the representative protein sequence for each cluster is shown on the outer ring.

[0045] FIG. 4—Complete RuvC/BH/HNH phylogenetic (IQ Tree 2)×5000 Ufbs tree with associations. Maximum likelihood phylogenetic analysis of all IscB and Cas9 RuvC/BH/HNH domains using IQ Tree 2. The LG substitution model with Gamma rates with 4 categories was used with 5000 ultra fast bootstraps (with hill-climbing nearest neighbor change for each bootstrap tree). Tree is rooted using cluster 34777, which include some of the most ancestral IscBs as determined by the RuvC/BH phylogenetic analyses. Associations are calculated for each cluster based on non-redundant loci (at 90% sequence identity of the main locus ORF). Ga-Gi refer to the IscB/IsrB main ωRNA profiles in FIG. 13A. HNH domain associations are shown with 3 colors, with cyan indicating the HNH domain has the H, N, and H catalytic residues, magenta indicating the HNH domain has the H, N, and N catalytic residues, and grey indicating that the HNH domain has an H, N, and not H/N catalytic residues. Sizes of REC-like insertion in the representative protein sequence for each cluster are shown as determined by the number of amino acids between the BH and the RuvC-II in the alignment. Total size of the representative protein sequence

[0046] FIG. 5—Complete RuvC/BH/HNH phylogenetic (RaxML)×2000 bs. Maximum likelihood phylogenetic analysis of all IscB and Cas9 RuvC/BH/HNH domains using RaxML. The PROTGAMMALG model was used with 2000 rapid bootstraps. Tree is rooted using cluster 34777, which include some of the most ancestral IscBs as determined by the RuvC/BH phylogenetic analyses. Associations are calculated for each cluster based on non-redundant loci (at 90% sequence identity of the main locus ORF). Ga-Gi refer to the IscB/IsrB main ωRNA profiles in FIG. 15. HNH domain associations are shown with 3 shades of gray, with cyan indicating the HNH domain has the H, N, and H catalytic residues, magenta indicating the HNH domain has the H, N, and N catalytic residues, and grey indicating that the HNH domain has an H, N, and not H/N catalytic residues. Sizes of REC-like insertion in the representative protein sequence for each cluster are shown as determined by the number of amino acids between the BH and the RuvC-II in the alignment. Total size of the representative protein sequence for each cluster is shown on the outer ring.

[0047] FIG. 6—Complete RuvC/BH/HNH phylogenetic (mrbayes)×10M iterations. Bayesian phylogenetic analysis of IscB and early Cas9 RuvC/BH/HNH domains using MrBayes with random starting trees. The LG substitution model was used with Gamma rates with 4 categories. 4 independent runs were run with 16 chains per with a delta temperature of 0.025 per chain for a total of 10M generations. 1000 swaps were attempted each generation, and tree samples were collected every 50 generations. The average standard deviation of split frequencies was 0.057890 at the final generation. Associations are calculated for each cluster based on non-redundant loci (at 90% sequence identity of the main locus ORF). Ga-Gi refer to the IscB/IsrB main ωRNA profiles in FIG. 15. HNH domain associations are shown with 3 colors, with cyan indicating the HNH domain has the H, N, and H catalytic residues, magenta indicating the HNH domain has the H, N, and N catalytic residues, and grey indicating that the HNH domain has an H, N, and not H/N catalytic residues. Sizes of REC-like insertion in the representative protein sequence for each cluster are shown as determined by the number of amino acids between the BH and the RuvC-II in the alignment. Total size of the representative protein sequence for each cluster is shown on the outer ring.

[0048] FIG. 7—Complete RuvC/BH phylogenetic analysis with IQ Tree 2. Maximum likelihood phylogenetic analysis of all IsrB, IscB and Cas9 RuvC/BH domains using IQ Tree 2. The LG substitution model with Gamma rates with 4 categories was used with 5000 ultra fast bootstraps (with hill-climbing nearest neighbor change for each bootstrap tree). The tree was rooted on the IsrB family. Associations are calculated for each cluster based on non-redundant loci (at 90% sequence identity of the main locus ORF). Ga-Gi refer to the IscB/IsrB main ωRNA profiles in FIG. 40. HNH domain associations are shown with 3 colors, with cyan indicating the HNH domain has the H, N, and H catalytic residues, magenta indicating the HNH domain has the H, N, and N catalytic residues, and grey indicating that the HNH domain has an H, N, and not H/N catalytic residues. Sizes of REC-like insertion in the representative protein sequence for each cluster are shown as determined by the number of amino acids between the BH and the RuvC-II in the alignment. Total size of the representative protein sequence for each cluster is shown on the outer ring.

[0049] FIG. 8 IscB/IsrB ωRNA phylogenetic analysis focused on Cas9 evolution. Same phylogenetic tree is FIG. 39 but focused on the early Cas9 evolution with the CRISPR-associated IscB cluster 2089. Support values for each branching are shown above the branches. Not all clusters included in other phylogenetic analyses could not be included in this analysis due to lack of a completely alignable ωRNA. For example, clusters 57212 and 50962 were not included. Clusters 2964, 21041, 57212, and 50962 were inferred as ancestral relative to the CRISPR-associated IscB cluster 2089 for the RuvC/BH/HNH amino acid phylogenetic analyses with RaxML (FIG. 12).

[0050] FIG. 9A-9C—Diversity and evolution of IscB. (9A) Phylogenetic tree of IsrB, IscB and Cas9. Associations with IS200/605 TnpA, ωRNA, CRISPR arrays, anti-repeats (where applicable), and Cas acquisition genes. ORF size of cluster representative is shown on the outermost ring. Positions of evolutionary events described in (9A) are marked by grayed circles/squares. (9B) Inferred evolutionary timeline linking IsrB to Cas9 with exemplifying loci. (9C) Structural diversity and evolution of ωRNAs in IsrB and IscB systems.

[0051] FIG. 10A-10D-Sensitivity analysis for inferred Cas9 ancestor (10A) RaxML maximum likelihood phylogenetic tree of the RuvC/BH/HNH alignment with 2000 rapid boot straps for computing support values. Only sections of the tree relevant to the early evolution of Cas9 are shown. (10B) BLOSUM62 similarity comparison of the RuvC-I, RuvC-II, RuvC-III, and HNH core regions (with alignment trimming, alignments provided in supplementary file) for early Cas9 II-D (clusters Cas9_1261, Cas9_665, Cas9_1079), a typical Cas9 (cluster Cas9_758), the putative Cas9 ancestor (2089), and example IscBs. (10C-10D) random taxon dropout analysis using FastTree2. Sample size for each dropout percentage category was calculated such that each taxon is retained on average for 1000 bootstrap samples. Clusters 2089, Cas9_1079, Cas9_665, and Cas9_1261 were retained in all samples. Error bars were calculated using 2000 bootstraps from the final samples. (10C) proportion of trees supporting CRISPR-associated IscB 2089 as the direct ancestor of all Cas9s as a function of taxa dropout rate. (10D) proportion of trees supporting mono/paraphyletic topologies involving Cas9, IsrB, or early II-D Cas9s as a function of the taxa dropout rate.

[0052] FIG. 11 (SEQ ID NO: 1567-1595)—Comparison of early Cas9 tracrRNAs to conserved ωRNAs from IscB and IsrB. ωRNA from the putative ancestor of all Cas9s (2089) is shown as well. Conserved region shared by the tracrRNA and IscB/IsrB ωRNAs corresponds to the nexus pseudoknot hairpin. Alignment was generated using MAFFT-ginsi. Additional, less conserved regions are not shown for this alignment. Specifically, the 5′ end is not conserved between tracrRNA and IscB ωRNAs.

[0053] FIG. 12—IscB/IsrB ωRNA phylogenetic analysis using IQ Tree 2. Maximum likelihood phylogenetic tree inference for the DNA alignment of ωRNA from IscB/IsrBs using IQ Tree 2. This tree was built using the best likelihood scoring tree of 200 independent runs as the starting tree with 5000 ultra fast bootstraps (with hill-climbing nearest neighbor change for each bootstrap tree) under the GTR substitution model, using empirical DNA frequencies from the alignment, ascertainment bias correction, and Gamma rates with 4 categories.

[0054] FIG. 13A-13B—Diverse ωRNAs associated with isrB and iscB. Secondary structure predictions for the main groups of ωRNA scaffolds associated with iseBs and isrBs. (13A) G1a, G1d, G1e, G1f, G1g, and G1i are associated with iscB while (13B) G1b, G1c, G1h are associated with isrB. G1a, G1b, G1c, G1d, G1h, and G1i secondary structures were predicted using R-scape while G1e, G1f, G1g were computed using consensus secondary structures with ViennaRNA due to the smaller sample sizes. While pseudoknots were not identified de novo for G1e, G2f, G1g, potential pseudoknots in similar locations to the other iscB/isrB ωRNAs can be found. Guide locations for all iscB/isrB ωRNAs would be predicted to be immediately upstream from each ωRNA scaffold where the 5′ label is located.

[0055] FIG. 14A-14J—Exploration of the diversity of IS200/605 superfamily nucleases. (14A) Evolution between IS200/605 transposon superfamily-encoded nucleases and associated RNAs. Dashed lines reflect tentative/unknown relationships. (14B) Locations of IscB loci and fragments in the I. tetrasporus genome. Intact locus is labeled as “ChlorIscB.” (14C) Small RNA-seq of I. tetrasporus. (14D) Weblogo of ChlorIscB cleavage TAM using a reprogrammed guide in an IVTT TAM screen. (14E) Weblogo of OgeuIscB TAM using a reprogrammed guide in an IVTT TAM screen. (14F (SEQ ID NO: 1596-1604)) Targeted OgeuIscB mediated indel formation in HEK293FT cells ordered by abundance, with indel size on the left. (14G) OgeuIscB mediated indel formation at multiple sites in HEK293T cells (* indicates p<0.05). (14H) Native expression of IsrB ωRNA in K. racemifer. (14I) Weblogo of Desulfovigula thermocuniculi (DthIsrB) TAM using a reprogrammed guide in an IVTT TAM screen. (14J) DthIsrB mediates ωRNA-guided non-target strand nicking in a TAM- and target-dependent manner in an IVTT cleavage assay using 5′ strand-specific labeled targets.

[0056] FIG. 15—Small RNA-seq of IsrB loci from K. racemifer shows expressed associated ωRNAs. Small RNA-seq reads greater than 200 bp mapped to the 5 IsrB loci present in K. racemifer. Each locus contains an expressed ncRNA transcript corresponding to a guide and ωRNA scaffold upstream of the IsrB ORF.

[0057] FIG. 16A-16C—IsrB nicks dsDNA in a target and TAM-dependent manner. (16A) Target cleavage by DthIsrB at various temperatures from 40 C to 70 C at 5 C increments. All cleavage reactions were performed using RNP complexes produced by IVTT reactions for 1 hour at the indicated temperatures, run on denaturing PAGE gels, and imaged in the IR800 and IR700 channels. Optimal temperature for nicking activity is approximately 60 C. Additionally, double-stranded cleavage was not observed at any temperature. (16B) Target cleavage by DchIsrB at various temperatures from 30 C to 60 C at 5 C increments. All cleavage reactions were performed using NP complexes produced by IVTT reactions for 1 hour at the indicated temperatures for 1 hour at the indicated temperatures, run on denaturing PAGE gels, and imaged in the IR700 and IR800 channels. Optimal temperature for nicking activity is approximately 45° C. Double-stranded cleavage was not observed at any temperature. (16C) Target cleavage by DthIsrB, DchIsrB, and KraIscB-1 performed at optimal temperatures (60° C., 45° C., and 37° C. respectively). All cleavage reactions were performed using RNP complexes produced by IVTT and incubated for 1 hour at their respective temperatures. Products were run on native PAGe and denaturing PAGE gels and imaged in the IR800 and IR700 channels. DthIsrB and DchIsrB perform non-target strand dsDNA nicking with no detectable double-stranded cleavage compared to KraIscB1.

[0058] FIG. 17—Phylogenetic distribution. Distribution of IscB, IsrB, and Cas9 across archaeal and bacterial phyla. Heatmap displays percentages of genomes containing a specific system.

[0059] FIG. 18—Naturally-occurring RNA-guided DNA-targeting systems. Comparison of Ω2 (OMEGA) systems with other known RNA-guided systems. In contrast to CRISPR systems, which capture spacer sequences and store them within the CRISPR array, in the locus, Ω systems transpose their loci (or trans-acting loci) into target sequences, apparently, converting targets into ωRNA guides in a process that can be called guide conscription.

[0060] FIG. 19—Targets of IscB/IsrB guides. Same as FIG. 20A with results of target search mapped on the second outermost ring. Notable groups are shown as labeled arcs on the outermost ring.

[0061] FIG. 20A-20B—Complete RuvC/BH phylogenetic analysis. (20A) Maximum likelihood phylogenetic analysis of all IsrB, IscB and Cas9 RuvC/BH domains using IQ-Tree 2. The LG substitution model with Gamma rates with 4 categories was used with 5000 ultrafast bootstraps (with hill-climbing nearest neighbor change for each bootstrap tree). (20B) Maximum likelihood phylogenetic analysis of all IsrB, IscB and Cas9 RuvC/BH domains using RaxML. The PROTGAMMALG model was used with 2000 rapid bootstraps. For both (20A) and (20B), the tree was rooted on the IsrB family. Associations are calculated for each cluster based on non-redundant loci (at 90% sequence identity of the main locus ORF). Ga-Gi refer to the IscB/IsrB main ωRNA profiles in FIG. 13A. HNH domain associations are shown with 3 colors, with cyan indicating the HNH domain has the H, N, and H catalytic residues, magenta indicating the HNH domain has the H, N, and N catalytic residues, and grey indicating that the HNH domain has an H, N, and not H/N catalytic residues. Sizes of REC-like insertion in the representative protein sequence for each cluster are shown as determined by the number of amino acids between the BH and the RuvC-II in the alignment. Total size of the representative protein sequence for each cluster is shown on the second outermost ring. Notable groups are shown as labeled colored arcs on the outermost ring.

[0062] FIG. 21A-21D—Complete RuvC/BH/HNH phylogenetic analysis of early Cas9 evolution. (21A) Bayesian phylogenetic analysis of IscB and early Cas9 RuvC/BH/HNH domains using MrBayes with random starting trees. The LG substitution model was used with Gamma rates with 4 categories. 4 independent runs were run with 16 chains per with a delta temperature of 0.025 per chain for a total of 10M generations on a GPU for ˜10 days. 1000 swaps were attempted each generation, and tree samples were collected every 50 generations. The average standard deviation of split frequencies was 0.057890 at the final generation. Associations are calculated for each cluster based on non-redundant loci (at 90% sequence identity of the main locus ORF). Ga-Gi refer to the IscB/IsrB main ωRNA profiles in FIG. 13A. HNH domain associations are shown with 3 colors, with cyan indicating the HNH domain has the H, N, and H catalytic residues, magenta indicating the HNH domain has the H, N, and N catalytic residues, and grey indicating that the HNH domain has an H, N, and not H/N catalytic residues. Sizes of REC-like insertion in the representative protein sequence for each cluster are shown as determined by the number of amino acids between the BH and the RuvC-II in the alignment. Total size of the representative protein sequence for each cluster is shown on the second outermost ring. Notable groups are shown as labeled colored arcs on the outermost ring. (21B) Same phylogenetic tree as (21A) with a focus on early Cas9 evolution. Bayesian posterior probabilities for each branch are shown along with the standard deviation of the posterior across all 4 runs. (21C)-(21D) Phylogenetic analysis of the RuvC/BH/HNH domains of early Cas9s and all IscBs using IQ-Tree 2. Each tree is the best scoring ML tree of 5 independent runs. Bootstrap supports were computed with 5000 ultrafast bootstraps. (21C) Phylogenetic analysis using the LG substitution model with gamma rates (4 categories). (21D) Phylogenetic analysis using the LG substitution model with invariant sites and gamma rates (4 categories).

[0063] FIG. 22A-22C—IscB/IsrB ωRNA phylogenetic analysis. (22A) Maximum likelihood phylogenetic tree inference for the DNA alignment of ωRNA from IscB/IsrBs using IQ-Tree 2. This tree was built using the best likelihood scoring tree of 200 independent runs as the starting tree with 5000 ultrafast bootstraps (with hill-climbing nearest neighbor change for each bootstrap tree) under the GTR substitution model, using empirical DNA frequencies from the alignment, ascertainment bias correction, and Gamma rates with 4 categories. (22B) Same phylogenetic tree as (22A) but focused on the early Cas9 evolution with the CRISPR-associated IscB cluster 2089. Support values for each branching are shown above the branches. Not all clusters included in other phylogenetic analyses could not be included in this analysis due to lack of a completely alignable ωRNA. For example, clusters 57212 and 50962 were not included. Clusters 2964, 21041, 57212, and 50962 were inferred as ancestral relative to the CRISPR-associated IscB cluster 2089 for the RuvC/BH/HNH amino acid phylogenetic analyses with RaxML (FIG. 35). (22C) Bayesian phylogenetic analysis of tracrRNA like ωRNAs. TracrRNAs from the early Cas9 clusters Cas9_1261 and Cas9_1665 were joined with their respective DRs and separated by a 4 bp poly-A tetraloop. 23 ωRNAs sharing alignment homology to all structural regions from the two tracrRNAs were identified. The resulting 25 RNAs were then aligned with MAFFT-ginsi and manually curated to reduce gappiness. Bayesian phylogenetic analysis of the resulting alignment was performed using MrBayes with 2 chains at a delta temperature of 0.025 with 8 independent runs for 5M generations. A standard GTR model with gamma rates and 4 categories was used. Trees were sampled every 50 generations. The average standard deviation of split frequencies was 0.005966 at the final generation. Bayesian posterior probabilities for each branching are shown above the branch, along with the average standard deviation across the 8 runs. The analysis suggests that the putative modern IscB ancestor of Cas9 (IscB cluster 2089) has an ωRNA descending from the same lineage of ωRNAs that likely resulted in the DR/tracrRNA (Bayesian posterior probability 89%).

[0064] FIG. 23A-23D—Comparison of IsrB, IscB and Cas9 subtype features. (57A) Comparison of protein lengths between IsrB, IscB, IscB (large) and Cas9 subtypes identified in this study. The II-D Cas9 group contains members which are substantially smaller than other Cas9 subtypes, while tnpA-associated II-C encompasses some substantially larger members. (23B) P-values resulting from t-tests of pairwise comparison of length distributions shown in (A). (23C) Comparison of median DR lengths for CRISPR arrays associated with IsrB, IscB, IscB (large), where CRISPR-associated, and Cas9 subtypes. Some mhpA-associated II-C loci contain substantially longer DRs (46-47 bp). (23D) Rate of tnpA association with IsrB, IscB, IscB (large) and Cas9 subtypes. 1/545 (0.2%) of unique IsrB loci, 56/2811 (2.0%) of unique IscB loci, including both IscB and IscB (large), and 115/1918 (6.0%) of unique II-C (TnpA) loci are associated with tnpA.

[0065] FIG. 24A-24C (SEQ ID NO: 1605-1607)—Cryo-EM structure of IsrB A) depiction of IsrB locus and Cas9 locus and their respective domain organizations; B) cartoon of IsrB and ωRNA at target DNA; C) cryo-EM reconstruction (left) and ribbon diagram (right) of the domain architecture of example IsrB protein and ωRNA.

[0066] FIG. 25A-25C (SEQ ID NO: 1608)—ωRNA Structure A) ωRNA sequence structure including stem loops and adaptor pseudoknot (PK) and nexus PK; B) ribbon diagram of the ωRNA structure; C) cleavage assay for ωRNA full length and with various modifications to stemloops and pseudoknots.

[0067] FIG. 26—includes depiction of RNA-guided DNA targeting mechanism of example IsrB system.

[0068] FIG. 27—ribbon diagram of example IsrB protein with comparison to IscB as depicted in Schuler et al. Science 2022 and Cas9 from Bravo et al. Nature (2022).

[0069] The figures herein are for illustrative purposes only and are not necessarily drawn to scale.

### DETAILED DESCRIPTION OF THE EXAMPLE EMBODIMENTS

### General Definitions

[0070] Unless defined otherwise, technical and scientific terms used herein have the same meaning as commonly understood by one of ordinary skill in the art to which this disclosure pertains. Definitions of common terms and techniques in molecular biology may be found in Molecular Cloning: A Laboratory Manual, 2^{nd} edition (1989) (Sambrook, Fritsch, and Maniatis); Molecular Cloning: A Laboratory Manual, 4^{th} edition (2012) (Green and Sambrook); Current Protocols in Molecular Biology (1987) (F. M. Ausubel et al. eds.); the series Methods in Enzymology (Academic Press, Inc.): PCR 2: A Practical Approach (1995) (M. J. MacPherson, B. D. Hames, and G. R. Taylor eds.): Antibodies, A Laboratory Manual (1988) (Harlow and Lane, eds.): Antibodies A Laboratory Manual, 2^{nd} edition 2013 (E. A. Greenfield ed.); Animal Cell Culture (1987) (R.I. Freshney, ed.); Benjamin Lewin, Genes IX, published by Jones and Bartlet, 2008 (ISBN 0763752223); Kendrew et al. (eds.), The Encyclopedia of Molecular Biology, published by Blackwell Science Ltd., 1994 (ISBN 0632021829); Robert A. Meyers (ed.), Molecular Biology and Biotechnology: a Comprehensive Desk Reference, published by VCH Publishers, Inc., 1995 (ISBN 9780471185710); Singleton et al., Dictionary of Microbiology and Molecular Biology 2nd ed., J. Wiley & Sons (New York, N.Y. 1994), March, Advanced Organic Chemistry Reactions, Mechanisms and Structure 4th ed., John Wiley & Sons (New York, N.Y. 1992); and Marten H. Hofker and Jan van Deursen, Transgenic Mouse Methods and Protocols, 2nd edition (2011).

[0071] As used herein, the singular forms “a”, “an”, and “the” include both singular and plural referents unless the context clearly dictates otherwise.

[0072] The term “optional” or “optionally” means that the subsequent described event, circumstance or substituent may or may not occur, and that the description includes instances where the event or circumstance occurs and instances where it does not.

[0073] The recitation of numerical ranges by endpoints includes all numbers and fractions subsumed within the respective ranges, as well as the recited endpoints.

[0074] The terms “about” or “approximately” as used herein when referring to a measurable value such as a parameter, an amount, a temporal duration, and the like, are meant to encompass variations of and from the specified value, such as variations of +/−10% or less, +/−5% or less, +/−1% or less, and +/−0.1% or less of and from the specified value, insofar such variations are appropriate to perform in the disclosed invention. For example, the amount “about 10” includes 10 and any amounts from 9 to 11. For example, the term “about” in relation to a reference numerical value can also include a range of values plus or minus 10%, 9%, 8%, 7%, 6%, 5%, 4%, 3%, 2%, or 1% from that value. It is to be understood that the value to which the modifier “about” or “approximately” refers is itself also specifically, and preferably, disclosed.

[0075] The term “about” as used herein when describing an amino acid sequence length or size or a range or ranges of amino acid sequence lengths or sizes are meant to encompass variations of and from the specified value, such as variations in amino acid length or size of +/−5 amino acids.

[0076] As used herein, a “biological sample” may contain whole cells and/or live cells and/or cell debris. The biological sample may contain (or be derived from) a “bodily fluid”. The present invention encompasses embodiments wherein the bodily fluid is selected from amniotic fluid, aqueous humour, vitreous humour, bile, blood serum, breast milk, cerebrospinal fluid, cerumen (earwax), chyle, chyme, endolymph, perilymph, exudates, feces, female ejaculate, gastric acid, gastric juice, lymph, mucus (including nasal drainage and phlegm), pericardial fluid, peritoneal fluid, pleural fluid, pus, rheum, saliva, sebum (skin oil), semen, sputum, synovial fluid, sweat, tears, urine, vaginal secretion, vomit and mixtures of one or more thereof. Biological samples include cell cultures, bodily fluids, cell cultures from bodily fluids. Bodily fluids may be obtained from a mammal organism, for example by puncture, or other collecting or sampling procedures.

[0077] The terms “subject,” “individual,” and “patient” are used interchangeably herein to refer to a vertebrate, preferably a mammal, more preferably a human. Mammals include, but are not limited to, murines, simians, humans, farm animals, sport animals, and pets. Tissues, cells and their progeny of a biological entity obtained in vivo or cultured in vitro are also encompassed.

[0078] The term “exemplary” is used herein to mean serving as an example, instance, or illustration. Any aspect or design described herein as “exemplary” is not necessarily to be construed as preferred or advantageous over other aspects or designs. Rather, use of the word exemplary is intended to present concepts in a concrete fashion.

[0079] A protein or nucleic acid derived from a species means that the protein or nucleic acid has a sequence identical to an endogenous protein or nucleic acid or a portion thereof in the species. The protein or nucleic acid derived from the species may be directly obtained from an organism of the species (e.g., by isolation), or may be produced, e.g., by recombination production or chemical synthesis.

[0080] Various embodiments are described hereinafter. It should be noted that the specific embodiments are not intended as an exhaustive description or as a limitation to the broader aspects discussed herein. One aspect described in conjunction with a particular embodiment is not necessarily limited to that embodiment and can be practiced with any other embodiment(s). Reference throughout this specification to “one embodiment”, “an embodiment,” “an example embodiment,” means that a particular feature, structure or characteristic described in connection with the embodiment is included in at least one embodiment of the present invention. Thus, appearances of the phrases “in one embodiment,” “in an embodiment,” or “an example embodiment” in various places throughout this specification are not necessarily all referring to the same embodiment but may. Furthermore, the particular features, structures or characteristics may be combined in any suitable manner, as would be apparent to a person skilled in the art from this disclosure, in one or more embodiments. Furthermore, while some embodiments described herein include some but not other features included in other embodiments, combinations of features of different embodiments are meant to be within the scope of the invention. For example, in the appended claims, any of the claimed embodiments can be used in any combination.

[0081] All publications, published patent documents, and patent applications cited herein are hereby incorporated by reference to the same extent as though each individual publication, published patent document, or patent application was specifically and individually indicated as being incorporated by reference.

### Overview

[0082] Embodiments disclosed herein provide IsrB systems that function as RNA-guided re-programmable nucleases. An IsrB system comprises a IsrB polypeptide and a nucleic acid component capable of forming a complex with the IsrB polypeptide and directing sequence-specific binding of the complex to a target sequence on the target polynucleotidek. The IsrB system described herein, along with IscB and homologs thereof including IshB, that collectively, along with TnpB systems, may be referred to as OMEGA (Obligate Mobile Element Guided Activity) systems or complexes, or Ω systems or complexes. The nucleic acid component may also be referred to herein as a ωRNA or hRNA. IsrB polypeptides, and homologs thereof, are considerably smaller than other known RNA-guide nucleases, such as Type II and Type V CRISPR-Cas nucleases, and only possess RuvC domain and do not possess a HNH domain. As such, IsrB polypeptides represent a novel class of RNA-guided nucleases that rely on a unique guide RNA structure and may a small size relative to other larger single-effector, RNA-guided nucleases, such as Type II and Type V CRISPR-Cas systems. Due to their smaller size, IsrB may be combined with other functional domains, such as nucleobase deaminases, reverse transcriptases, transposases, ligases, topoisomerases, and serine and threonine recombinases and still be packaged in conventional delivery systems, like certain adenoviruse and lentiviral based viral vectors. Thus, among other improvements, the IsrB system disclosed herein allow more flexible and effective strategies to manipulate and modify target polynucleotides. As shown in FIG. 4, phylogenetic analysis shows IsrB formed a distinct clade from Cas9. IsrB polypeptides are not associated with CRISPR-Cas adaptation genes (cas1, cas2, cas4, and csn2).

[0083] In another aspect, embodiments disclosed herein include applications of the IsrB systems, including therapeutics, diagnostics, functional screening, synthetic biology and biomanufacturing. Delivery of the proteins and systems disclosed is also provided, including to a variety of cells and via a variety of delivery systems.

[0084] In another aspect, embodiments disclosed herein include applications of the IsrB compositions herein, including diagnostics, therapeutics, and methods of detection. Delivery of the proteins and systems disclosed is also provided, including to a variety of cells and via a variety of particles, vesicles and vectors.

### IsrB Polypeptides

[0085] In one embodiment, IsrB polypeptides of the present invention may comprise a split RuvC nuclease domain comprising RuvC-1, Ruv-C II, and Ruv-C III subdomains. In one example embodiment, the RuvC endonuclease domain is split by the insertion of a bridge helix domain. However, unlike Type II CRISPR-Cas proteins, IsrB polypeptides do not contain a Rec domain. In addition, IsrB polypeptides may further comprise a conserved N-terminal domain (also referred to herein as a PLMP domain), which is not present in Cas9 proteins. IsrB proteins may also further comprise a conserved C-terminal domain. IsrBs have a structurally distinct ωRNA.

[0086] In one example embodiment, an IsrB polypeptide comprises, moving from the N- to C-terminus, a PLMP domain, a RuvC-I subdomain, a RuvC-II subdomain, a RuvC-III subdomain, and a C terminal domain. In another example embodiment, a bridge helix domain may be inserted between the RuvC-1 and RuvC-II subdomains.

[0087] In certain example embodiments, the IsrB polypeptides are between 180 and 600 amino acids in size, between 200 and 590 amino acids in size, between 200 and 780 amino acids in size, between 200 and 570 amino acids in size, between 200 and 560 amino acids in size, between 200 and 550 amino acids in size, between 200 and 540 amino acids in size, between 200 and 530 amino acids in size, between 200 and 520 amino acids in size, between 200 and 510 amino acids in size, between 200 and 500 amino acids in size, between 200 and 490 amino acids in size, between 200 and 480 amino acids in size, between 200 and 470 amino acids in size, between 200 and 460 amino acids in size, between 200 and 450 amino acids in size, between 200 and 440 amino acids in size, between 200 and 430 amino acids in size, between 200 and 420 amino acids in size, between 200 and 410 amino acids in size, between 200 and 400 amino acids in size, between 200 and 390 amino acids in size, between 200 and 380 amino acids in size, between 200 and 370 amino acids in size, between 200 and 360 amino acid, between 200 between 350 amino acids, between 200 and 340 amino acids, between 200 and 330 amino acids, between 200 and 320 amino acids, between 200 and 310 amino acids, between 200 and 300 amino acids, between 200 and 290 amino acids, between 200 and 280 amino acids, between 200 and 270 amino acids, between 200 and 260 amino acids, between 200 and 250 amino acids, between 200 and 240 amino acids, between 200 and 230 amino acids, between 200 and 220 amino acids, between 200 and 210 amino acids, between 200 and 200 amino acids, between 300 and 400 amino acids. Between 300 and 500 amino acids, between 300 and 600 amino acids, between 400 and 500 amino acids, or between 500 and 600 amino acids. In one example embodiment, the polypeptide may range in size from 400-500 amino acids, 400-490 amino acids, 400-480 amino acids, 400-470 amino acids, 400-460 amino acids, 400-450 amino acids, 400-440 amino acids, 400-430 amino acids. Size variation may be dependent, in part, on the particular domain architecture of the IsrB or its homolog.

[0088] The IsrB polypeptides may be derived from a naturally occurring protein, a modified naturally occurring protein, functional fragment or truncated version thereof, or a non-naturally occurring protein. In one example embodiments, the IsrBpolypeptide may comprise one or more domains originating from other IsrBpolypeptidenucleases, more particularly originating from different organisms. In an embodiment, the IsrBpolypeptide nucleases may be designed by in silico approaches. Examples of in silico protein design have been described in the art and are therefore known to a skilled person. In particular embodiments, the IsrB polypeptide loci is not associated with a CRISPR array.

[0089] The IsrB polypeptides may also encompasses homologs or orthologs of IsrB polypeptides whose sequences are specifically described herein. The terms “ortholog” and “homolog” are well known in the art. By means of further guidance, a “homolog” refers to two genes that share a common ancesteral gene. Homologous proteins may but need not be structurally related or are only partially structurally related. An “ortholog” are two genes that share common ancestral gene but occur in different species. Orthologous proteins may but need not be structurally related or are only partially structurally related. In one embodiment, the homolog or ortholog of a IsrB polypeptide nucleases such as referred to herein has a sequence homology or identity of at least 80%, at least 85%, at least 90%, at least 95% with a IsrB polypeptide nuclease. In further embodiments, the homolog or ortholog of a IsrB polypeptide nuclease has a sequence identity of at least 80%, at least 85%, at least 90%, or at least 95% with a wildtype IsrB polypeptide nuclease, in a particular embodiment the IsrB sequence identified in Table 1 below.

### PLMP Domain

[0090] The IsrB polypeptides comprise a conserved N-terminal domain, which is referred to herein as a PLMP domain or an X domain. In embodiments, the N-terminal X domain may have one or more conserved residues and/or motifs as identified in FIG. 1; see also. In one embodiment, the PLMP domain comprises a conserved PLMP (SEQ ID NO:2372) amino acid motif. The PLMP motif can be located at or near the N terminus of the IsrB polypeptide, including, for example at amino acids 17-20 of DthIsrB (SEQ ID NO: 300; SEQ ID NO: 1306), or amino acids corresponding to D. thermocuniculi DSM 16036 IsrB, and at amino acids 12-15 for KraIsrB (SEQ ID NO: 128), or amino acids corresponding to K. racemifer DSM 44963 IsrB.

[0091] In some examples, the PLMP domain may be no more than 10, no more than 20, no more than 30, no more than 40, no more than 50, no more than 60, no more than 70, no more than 80, no more than 90, or no more than 100 amino acids in length. For example, the PLMP domain may be no more than 70 amino acids in length, such as comprising 2 3, 4, 5, 6, 7, 8, 9, 10, 11, 12, 13, 14, 15, 16, 17, 18, 19, 20, 21, 22, 23, 24, 25, 26, 27, 28, 29, 30, 31, 32, 33, 34, 35, 36, 37, 38, 39, 40, 41, 42, 43, 44, 45, 46, 47, 48, 49, 50, 51, 52, 53, 54, 55, 56, 57, 58, 59, 60, 61, 62, 63, 64, 65, 66, 67, 68, 69, or 70 amino acids in length. An example PLMP domain can be as identified in, e.g. FIG. 58. PLMP domains may be found upstream of the RuvC-I domain and/or Bridge Helix, where present, of an IsrB polypeptide. In one embodiment, the PLMP domain is located within 150, 140, 130, 120, 110, 100, 90, 80, 70, 60, 50, 40, 30, 20 or 10 amino acids upstream of the RuvC-1 domain.

[0092] In an aspect, truncation of the N-terminus domain of an IsrB polypeptide, including. more than 4, 5, 6, 7, 8, 9, 10, 11, 12, 13, 14 or 15 amino acids, up to 70 amino acids of the N terminus, i.e. truncation of the PLMP domain, abolishes activity of the IsrB IsrB polypeptide. In an aspect, more than 4 amino acids PLMP domain may reduce or abolish IscB activity. C-terminal domain.

### RuvC Domain

[0093] The RuvC domain of the IsrB polypeptide may comprise multiple subdomains, e.g., RuvC-I, RuvC-II and RuvC-III. The subdomains may be separated by interval sequences on the amino acid sequence of the protein.

[0094] Examples of RuvC domains include any polypeptides having a structural similarity and/or sequence similarity to a RuvC domain described in the art. For example, the RuvC domain may share a structural similarity and/or sequence similarity to a RuvC of Cas9. In some examples, the RuvC domain may have an amino acid sequence that share at least 50%, at least 55%, at least 60%, at least 5%, at least 70%, at least 75%, at least 80%, at least 85%, at least 90%, at least 95%, at least 99%, or 100% sequence identity with RuvC domains.

[0095] In some examples, the RuvC domain comprise RuvC-I polypeptide, RuvC-II polypeptide, and RuvC-III polypeptide. Examples of the RuvC-I domain also include any polypeptides having a structural similarity and/or sequence similarity to a RuvC-I domain described in the art. For example, the RuvC-I domain may share a structural similarity and/or sequence similarity to a RuvC-I of Cas9. In some examples, the RuvC domain may have an amino acid sequence that share at least 50%, at least 55%, at least 60%, at least 5%, at least 70%, at least 75%, at least 80%, at least 85%, at least 90%, at least 95%, at least 99%, or 100% sequence identity with RuvC-I domain. The RuvC-II domain also include any polypeptides a structural similarity and/or sequence similarity to a RuvC-II domain described in the art. For example, the RuvC-II domain may share a structural similarity and/or sequence similarity to a RuvC-II of Cas9. In some examples, the RuvC domain may have an amino acid sequence that share at least 50%, at least 55%, at least 60%, at least 5%, at least 70%, at least 75%, at least 80%, at least 85%, at least 90%, at least 95%, at least 99%, or 100% sequence identity with RuvC-II domains. The RuvC-III domain also include any polypeptides a structural similarity and/or sequence similarity to a RuvC-III domain described in the art. For example, the RuvC-III domains may share a structural similarity and/or sequence similarity to a RuvC-III of Cas9. In some examples, the RuvC domain may have an amino acid sequence that share at least 50%, at least 55%, at least 60%, at least 5%, at least 70%, at least 75%, at least 80%, at least 85%, at least 90%, at least 95%, at least 99%, or 100% sequence identity with RuvC-III domains.

[0096] For example, and as described in the art (e.g., Crystal structure of Cas9 in complex with guide RNA and target DNA, Nishimasu et al. Cell, 2014) the RuvC domain of Cas9 consists of a six-stranded mixed β-sheet (β1, β2, β5, β11, β14 and β17) flanked by α-helices (α33, α34 and α39-α45) and two additional two-stranded antiparallel β-sheets (β3/β4 and β15/β16). It has been described that the RuvC domain of Cas9 shares structural similarity with the retroviral integrase superfamily members characterized by an RNase H fold, such as Escherichia coli RuvC (PDB code 1HJR, 14% identity, root-mean-square deviation (rmsd) of 3.6 Å for 126 equivalent Ca atoms) and Thermus thermophilus RuvC (PDB code 4LD0, 12% identity, rmsd of 3.4 Å for 131 equivalent Ca atoms). E. coli RuvC is a 3-layer alpha-beta sandwich containing a 5-stranded beta-sheet sandwiched between 5 alpha-helices. RuvC nucleases have four catalytic residues (e.g., Asp7, Glu70, His143 and Asp146 in T. thermophilus RuvC), and cleave Holliday junctions (or structurally analogous cruciform junctions) through a two-metal mechanism. Asp10 (Ala), Glu762, His983 and Asp986 of the Cas9 RuvC domain are located at positions similar to those of the catalytic residues of T. thermophilus RuvC.

[0097] In an aspect, the IsrB comprises an inactive RuvC domain. In one embodiment the IsrB polypeptide comprising an inactive RuvC domain comprises a sequence selected from SEQ ID NO: 1445-1523.

### Bridge Helix

[0098] The nucleic-acid guided nuclease comprises a bridge helix (BH) domain. The bridge helix domain refers to a helix and arginine rich polypeptide. The bridge helix domain may be located next to anyone of the amino acid domains in the nucleic-acid guided nuclease. In one embodiment, the bridge helix domain is next to a RuvC domain, e.g., next to RuvC-I, RuvC-II, or RuvC-III subdomain. In one example, the bridge helix domain is between a RuvC-1 and RuvC2 subdomains.

[0099] The bridge helix domain may be from 10 to 100, from 20 to 60, from 30 to 50, e.g., 35, 36, 37, 38, 39, 40, 41, 42, 43, 44, 45, 46 or 47, 48, 49, or 50 amino acids in length. Examples of bridge helix includes the polypeptide of amino acids 60-93 of the sequence of S. pyogenes Cas9.

[0100] In an embodiment, examples of the BH domain include those in Table 1. Examples of the BH domain also include any polypeptides a structural similarity and/or sequence similarity to a BH domain described in the art. For example, the BH domain may share a structural similarity and/or sequence similarity to a BH domain of Cas9. In some examples, the BH domain may have an amino acid sequence that share at least 50%, at least 55%, at least 60%, at least 5%, at least 70%, at least 75%, at least 80%, at least 85%, at least 90%, at least 95%, at least 99%, or 100% sequence identity with BH domains in Table 1.

### C-Terminal Domain

[0101] The C-terminal domain (also referred to herein as a Y domain) may comprise one or more conserved residues or motifs as shown in FIG. 14A. The C-terminal domain may be no more than 10, no more than 20, no more than 30, no more than 40, no more than 50, no more than 60, no more than 70, no more than 80, no more than 90, or no more than 100 amino acids in length. For example, the C-terminal domain may be no more than 70 amino acids in length, such as comprising 2 3, 4, 5, 6, 7, 8, 9, 10, 11, 12, 13, 14, 15, 16, 17, 18, 19, 20, 21, 22, 23, 24, 25, 26, 27, 28, 29, 30, 31, 32, 33, 34, 35, 36, 37, 38, 39, 40, 41, 42, 43, 44, 45, 46, 47, 48, 49, 50, 51, 52, 53, 54, 55, 56, 57, 58, 59, 60, 61, 62, 63, 64, 65, 66, 67, 68, 69, or 70 amino acids in length.

### Example IsrB Polypeptides

[0102] The following table provides example IsrB polypeptides that may be used in the IsrB systems disclosed herein.

TABLE 1
Exemplary IsrB Polypeptides

| SEQ ID NO | Contig Desc |
|---|---|
| 1 | Scytonema hofmannii PCC 7110 genomic scaffold Scaffold1, whole genome shotgun |
| | sequence |
| 2 | Scytonema sp. HK-05 DNA, nearly complete genome |
| 3 | Scytonema sp. HK-05 DNA, nearly complete genome |
| 4 | Ga0315277_10038595 |
| 5 | Moorea producens PAL-8-15-08-1 chromosome, complete genome |
| 6 | Geitlerinema sp. PCC 7105 genomic scaffold Gei7105DRAFT_GPC.5, whole |
| | genome shotgun sequence |
| 7 | Arthrospira platensis str. Paraca isolate UASWS Contig183, whole genome shotgun |
| | sequence |
| 8 | Microcystis aeruginosa 9443 WGS project CAIJ01000000 data, contig |
| | AAI_C_2197_378, whole genome shotgun sequence |
| 9 | Moorea bouillonii PNG strain PNG5-198 Ga0081470_101, whole genome shotgun |
| | sequence |
| 10 | Moorea producens 3L Ga0081465_101, whole genome shotgun sequence |
| 11 | Microcoleus sp. IPPAS B-353 genomic scaffold scaffold1, whole genome shotgun |
| | sequence |
| 12 | Spirulina major PCC 6313 genomic scaffold Contig40, whole genome shotgun |
| | sequence |
| 13 | Spirulina major PCC 6313 genomic scaffold Contig40, whole genome shotgun |
| | sequence |
| 14 | Scytonema sp. HK-05 DNA, nearly complete genome |
| 15 | Scytonema sp. NIES-4073 DNA, nearly complete genome |
| 16 | Candidatus Poribacteria bacterium isolate SB0663_bin_6 |
| | NODE_237_length_23550_cov_6.594254, whole genome shotgun sequence |
| 17 | Candidatus Poribacteria bacterium isolate PCPOR1 Ga0206387_1056, whole |
| | genome shotgun sequence |
| 18 | Scytonema sp. HK-05 DNA, nearly complete genome |
| 19 | Scytonema sp. HK-05 DNA, nearly complete genome |
| 20 | Scytonema sp. NIES-4073 DNA, nearly complete genome |
| 21 | Calothrix sp. NIES-4105 DNA, nearly complete genome |
| 22 | Scytonema sp. NIES-4073 DNA, nearly complete genome |
| 23 | Scytonema sp. HK-05 DNA, nearly complete genome |
| 24 | Scytonema sp. HK-05 DNA, nearly complete genome |
| 25 | Scytonema sp. NIES-4073 DNA, nearly complete genome |
| 26 | metagenome genome assembly, contig: |
| | NODE_3439_length_13191_cov_268.301586, whole genome shotgun sequence |
| 27 | Calothrix sp. NIES-2100 DNA, nearly complete genome |
| 28 | Scytonema sp. NIES-4073 DNA, nearly complete genome |
| 29 | Scytonema sp. HK-05 DNA, nearly complete genome |
| 30 | Symploca sp. SIO2C1 2C1_NODE_99, whole genome shotgun sequence |
| 31 | Scytonema sp. NIES-4073 DNA, nearly complete genome |
| 32 | Scytonema sp. NIES-4073 DNA, nearly complete genome |
| 33 | Scytonema sp. HK-05 DNA, nearly complete genome |
| 34 | Tychonema bourrellyi FEM_GT703 scaffold165_size8795, whole genome shotgun |
| | sequence |
| 35 | Scytonema sp. HK-05 DNA, nearly complete genome |
| 36 | Scytonema sp. HK-05 DNA, nearly complete genome |
| 37 | Scytonema sp. HK-05 DNA, nearly complete genome |
| 38 | Scytonema sp. HK-05 DNA, nearly complete genome |
| 39 | Symploca sp. SIO2B6 2B6_NODE_3, whole genome shotgun sequence |
| 40 | Calothrix sp. NIES-4071 DNA, complete genome |
| 41 | Planktothrix prolifica NIVA-CYA 406 contig00287, whole genome shotgun |
| | sequence |
| 42 | Moorea producens PAL-8-15-08-1 chromosome, complete genome |
| 43 | Calothrix sp. NIES-4105 DNA, nearly complete genome |
| 44 | TPA_asm: Cyanobacteria bacterium UBA11162 contig_8303, whole genome |
| | shotgun sequence |
| 45 | Trichormus variabilis SAG 1403-4b sequence01, whole genome shotgun sequence |
| 46 | Calothrix sp. NIES-4071 DNA, complete genome |
| 47 | Calothrix sp. NIES-4105 DNA, nearly complete genome |
| 48 | Moorea producens PAL-8-15-08-1 chromosome, complete genome |
| 49 | Moorea producens JHB sequence |
| 50 | Spirulina major PCC 6313 Contig40_C6, whole genome shotgun sequence |
| 51 | Calothrix sp. NIES-4071 DNA, complete genome |
| 52 | Moorea producens 3L Ga0081465_101, whole genome shotgun sequence |
| 53 | Moorea producens JHB sequence |
| 54 | Moorea producens PAL strain NAK12DEC93-3La Ga0081465_101, whole genome |
| | shotgun sequence |
| 55 | Calothrix sp. PCC 6303, complete genome |
| 56 | Moorea producens JHB sequence |
| 57 | Moorea sp. SIO3I6 3I6_NODE_94, whole genome shotgun sequence |
| 58 | Moorea producens 3L Ga0081465_101, whole genome shotgun sequence |
| 59 | Tolypothrix bouteillei VB521301 NODE_1_length_9494340_cov_10.278967, whole |
| | genome shotgun sequence |
| 60 | Moorea producens 3L Ga0081465_101, whole genome shotgun sequence |
| 61 | Ardenticatenales bacterium isolate MGR_bin47 SD2897-2912_k127_7054962, |
| | whole genome shotgun sequence |
| 62 | Moorea producens PAL strain NAK12DEC93-3La Ga0081465_101, whole genome |
| | shotgun sequence |
| 63 | Moorea producens PAL strain NAK12DEC93-3La Ga0081465_101, whole genome |
| | shotgun sequence |
| 64 | Calothrix brevissima NIES-22 DNA, nearly complete genome |
| 65 | Moorea producens 3L Ga0081465_101, whole genome shotgun sequence |
| 66 | Moorea producens PAL strain NAK12DEC93-3La Ga0081465_101, whole genome |
| | shotgun sequence |
| 67 | Moorea bouillonii PNG strain PNG5-198 Ga0081470_101, whole genome shotgun |
| | sequence |
| 68 | Moorea bouillonii PNG strain PNG5-198 Ga0081470_101, whole genome shotgun |
| | sequence |
| 69 | Microcystis panniformis FACHB-1757, complete genome |
| 70 | Moorea bouillonii PNG strain PNG5-198 Ga0081470_101, whole genome shotgun |
| | sequence |
| 71 | Moorea producens PAL strain NAK12DEC93-3La Ga0081465_101, whole genome |
| | shotgun sequence |
| 72 | Microcoleus sp. Co-bin12 k141_6726532_length_3994_cov_14.2126, whole genome |
| | shotgun sequence |
| 73 | Microcystis sp. MC19 chromosome, complete genome |
| 74 | Microcystis panniformis FACHB-1757, complete genome |
| 75 | Calothrix parasitica NIES-267 DNA, nearly complete genome |
| 76 | Calothrix parasitica NIES-267 DNA, nearly complete genome |
| 77 | Burkholderiales bacterium isolate ES-bin-76 ES-bin-76-contig-k141_6057916, |
| | whole genome shotgun sequence |
| 78 | Moorea bouillonii PNG strain PNG5-198 Ga0081470_101, whole genome shotgun |
| | sequence |
| 79 | Moorea bouillonii PNG strain PNG5-198 Ga0081470_101, whole genome shotgun |
| | sequence |
| 80 | Nostoc flagelliforme CCNUN1 chromosome, complete genome |
| 81 | Moorea sp. SIO3I6 3I6_NODE_94, whole genome shotgun sequence |
| 82 | Fischerella sp. NIES-4106 DNA, nearly complete genome |
| 83 | Brasilonema sp. UFV-L1 scaffold148_cov13, whole genome shotgun sequence |
| 84 | Moorea sp. SIO2C4 2C4_NODE_889, whole genome shotgun sequence |
| 85 | Arthrospira sp. str. PCC 8005 chromosome, complete genome |
| 86 | Microcoleus sp. PCC 7113, complete genome |
| 87 | Arthrospira sp. TJSD092 chromosome, complete genome |
| 88 | Limnospira sp. BM chromosome |
| 89 | Microcystis panniformis FACHB-1757, complete genome |
| 90 | Microcoleus sp. IPPAS B-353 Scaffolds01.1, whole genome shotgun sequence |
| 91 | Moorea sp. SIO2C4 2C4_NODE_889, whole genome shotgun sequence |
| 92 | Anabaena variabilis NIES-23 plasmid plasmid3 DNA, nearly complete genome |
| 93 | Nodularia sp. NIES-3585 DNA, scaffold: scaffold1, whole genome shotgun sequence |
| 94 | Oscillatoria acuminata PCC 6304, complete genome |
| 95 | Moorea sp. SIO3B2 3B2_NODE_853, whole genome shotgun sequence |
| 96 | Microcoleus sp. PCC 7113, complete genome |
| 97 | Deltaproteobacteria bacterium isolate B7_G9 B7_Guay9_scaffold_45962, whole |
| | genome shotgun sequence |
| 98 | Limnospira fusiformis SAG 85.79 chromosome, complete genome |
| 99 | Arthrospira platensis C1 chromosome, whole genome shotgun sequence |
| 100 | Microcoleus sp. PCC 7113, complete genome |
| 101 | Calothrix desertica PCC 7102 sequence007, whole genome shotgun sequence |
| 102 | Microcoleus sp. PCC 7113, complete genome |
| 103 | Aphanocapsa montana BDHKU210001 |
| | NODE_102_length_99650_cov_131.448837, whole genome shotgun sequence |
| 104 | Oscillatoria acuminata PCC 6304, complete genome |
| 105 | Ga0373628_0092043 |
| 106 | sediment metagenome genome assembly, contig: |
| | NODE_771_length_39337_cov_4.259322, whole genome shotgun sequence |
| 107 | Microcystis viridis NIES-102 DNA, complete genome |
| 108 | Planktothrix sp. FACHB-1365 contig1, whole genome shotgun sequence |
| 109 | Arthrospira platensis NIES-39, *** SEQUENCING IN PROGRESS ***, 19 ordered |
| | pieces |
| 110 | Arthrospira platensis NIES-39, *** SEQUENCING IN PROGRESS ***, 19 ordered |
| | pieces |
| 111 | Microcystis aeruginosa FD4 chromosome, complete genome |
| 112 | Planktothrix prolifica NIVA-CYA 540 genomic scaffold scaffold00001, whole |
| | genome shotgun sequence |
| 113 | Planktothrix prolifica NIVA-CYA 98 genomic scaffold scaffold00001, whole |
| | genome shotgun sequence |
| 114 | Ga0315279_10002905 |
| 115 | Microcystis viridis NIES-102 DNA, complete genome |
| 116 | Ga0315284_10001184 |
| 117 | Chroococcidiopsis sp. PCC 6712 Ga0438089_03, whole genome shotgun sequence |
| 118 | Nostoc sphaeroides CCNUC1 chromosome Gxm1, complete sequence |
| 119 | Scytonema millei VB511283 scaffold_1, whole genome shotgun sequence |
| 120 | Sediment metagenome Contig_107, whole genome shotgun sequence |
| 121 | Leptolyngbyaceae cyanobacterium CCMR0082 Scaffold_1b, whole genome shotgun |
| | sequence |
| 122 | Planktothrix prolifica NIVA-CYA 98 genomic scaffold scaffold00001, whole |
| | genome shotgun sequence |
| 123 | Anabaena sp. CA = ATCC 33047 contig081, whole genome shotgun sequence |
| 124 | Planktothrix prolifica NIVA-CYA 540 genomic scaffold scaffold00001, whole |
| | genome shotgun sequence |
| 125 | Moorea sp. SIO3I8 3I8_NODE_130, whole genome shotgun sequence |
| 126 | Anabaena sp. WA102, complete genome |
| 127 | Planktothrix prolifica NIVA-CYA 406 genomic scaffold scaffold00001, whole |
| | genome shotgun sequence |
| 128 | Ktedonobacter racemifer DSM 44963 strain SOSP1-21 Krac_Contig206, whole |
| | genome shotgun sequence |
| 129 | Arthrospira platensis YZ genome |
| 130 | Planktothrix prolifica NIVA-CYA 98 genomic scaffold scaffold00001, whole |
| | genome shotgun sequence |
| 131 | Pleurocapsa sp. PCC 7319 genomic scaffold Pleur7319scaffold_7, whole genome |
| | shotgun sequence |
| 132 | Arthrospira platensis YZ genome |
| 133 | Microcystis panniformis FACHB-1757, complete genome |
| 134 | Calothrix anomala FACHB-343 contig2, whole genome shotgun sequence |
| 135 | Nodularia sp. NIES-3585 DNA, scaffold: scaffold1, whole genome shotgun sequence |
| 136 | Oscillatoriales cyanobacterium RU_3_3 NODE_1980_length_14615_cov_2.286996, |
| | whole genome shotgun sequence |
| 137 | Spirulina major PCC 6313 genomic scaffold Contig40, whole genome shotgun |
| | sequence |
| 138 | Mastigocladopsis repens PCC 10914 genomic scaffold |
| | Mas10914DRAFT_scaffold1.1, whole genome shotgun sequence |
| 139 | Microcystis aeruginosa NIES-843 DNA, complete genome |
| 140 | Fischerella sp. PCC 9605 FIS9605DRAFT_scaffold12.12_C, whole genome shotgun |
| | sequence |
| 141 | Tolypothrix [Scytonema hofmanni] UTEX 2349 genomic scaffold |
| | Tol9009DRAFT_TPD.8, whole genome shotgun sequence |
| 142 | Spirulina major PCC 6313 genomic scaffold Contig40, whole genome shotgun |
| | sequence |
| 143 | Microcoleus chthonoplastes PCC 7420 scf_1103659003828 genomic scaffold, whole |
| | genome shotgun sequence |
| 144 | Cyanothece sp. PCC 7822, complete genome |
| 145 | Thermanaeromonas toyohensis ToBE genome assembly, chromosome: I |
| 146 | Leptolyngbyaceae cyanobacterium CCMR0082 Scaffold_1b, whole genome shotgun |
| | sequence |
| 147 | Planktothrix prolifica NIVA-CYA 540 genomic scaffold scaffold00001, whole |
| | genome shotgun sequence |
| 148 | Microcystis aeruginosa FD4 chromosome, complete genome |
| 149 | Ga0373625_0039173 |
| 150 | Planktothrix prolifica NIVA-CYA 406 genomic scaffold scaffold00001, whole |
| | genome shotgun sequence |
| 151 | Moorea sp. SIO3B2 3B2_NODE_23, whole genome shotgun sequence |
| 152 | Microcystis viridis NIES-102 DNA, complete genome |
| 153 | Spirulina major PCC 6313 genomic scaffold Contig40, whole genome shotgun |
| | sequence |
| 154 | Microcystis aeruginosa NIES-4264 DNA, contig_41, whole genome shotgun |
| | sequence |
| 155 | Cyanothece sp. PCC 7822, complete genome |
| 156 | Dolichospermum sp. UHCC 0315A chromosome, complete genome |
| 157 | Cyanothece sp. PCC 7822, complete genome |
| 158 | Mastigocladopsis repens PCC 10914 genomic scaffold |
| | Mas10914DRAFT_scaffold1.1, whole genome shotgun sequence |
| 159 | Tolypothrix [Scytonema hofmanni] UTEX 2349 genomic scaffold |
| | Tol9009DRAFT_TPD.8, whole genome shotgun sequence |
| 160 | Dolichospermum sp. UHCC 0315A chromosome, complete genome |
| 161 | Microcystis aeruginosa NIES-843 DNA, complete genome |
| 162 | Chroococcidiopsis sp. PCC 6712 Ga0438089_03, whole genome shotgun sequence |
| 163 | Spirulina major PCC 6313 genomic scaffold Contig40, whole genome shotgun |
| | sequence |
| 164 | Ga0315284_10185211 |
| 165 | Mastigocladopsis repens PCC 10914 genomic scaffold |
| | Mas10914DRAFT_scaffold1.1, whole genome shotgun sequence |
| 166 | Microcystis panniformis FACHB-1757, complete genome |
| 167 | Cyanothece sp. PCC 7822, complete genome |
| 168 | Ga0315273_10142751 |
| 169 | Spirulina major PCC 6313 genomic scaffold Contig40, whole genome shotgun |
| | sequence |
| 170 | Microcystis sp. MC19 chromosome, complete genome |
| 171 | Ktedonobacter racemifer DSM 44963 strain SOSP1-21 Krac_Contig206, whole |
| | genome shotgun sequence |
| 172 | Spirulina major PCC 6313 genomic scaffold Contig40, whole genome shotgun |
| | sequence |
| 173 | Geitlerinema sp. PCC 7105 genomic scaffold Gei7105DRAFT_GPC.5, whole |
| | genome shotgun sequence |
| 174 | Anabaena sp. PCC 7108 genomic scaffold Ana7108scaffold_2, whole genome |
| | shotgun sequence |
| 175 | Anabaena sp. 90 chromosome chANA01, complete sequence |
| 176 | Hapalosiphonaceae cyanobacterium JJU2 Scaffold_61, whole genome shotgun |
| | sequence |
| 177 | Ktedonobacter racemifer DSM 44963 strain SOSP1-21 Krac_Contig205, whole |
| | genome shotgun sequence |
| 178 | Spirulina major PCC 6313 genomic scaffold Contig40, whole genome shotgun |
| | sequence |
| 179 | Firmicutes bacterium R50 isolate R501 genome assembly, chromosome: 1 |
| 180 | Oscillatoriales cyanobacterium isolate PH2015_11S_45_847 |
| | PH2015_11S_scaffold_340, whole genome shotgun sequence |
| 181 | Dolichospermum compactum NIES-806 DNA, nearly complete genome |
| 182 | Dactylococcopsis salina PCC 8305, complete genome |
| 183 | Planktothrix agardhii NIVA-CYA 34 contig00043, whole genome shotgun sequence |
| 184 | Microcystis aeruginosa PCC 7005 Mic7005contig745, whole genome shotgun |
| | sequence |
| 185 | Spirulina subsalsa PCC 9445 genomic scaffold Contig210, whole genome shotgun |
| | sequence |
| 186 | Spirulina subsalsa PCC 9445 genomic scaffold Contig210, whole genome shotgun |
| | sequence |
| 187 | Ga0373626_0090068 |
| 188 | Crinalium epipsammum PCC 9333, complete genome |
| 189 | Subsurface metagenome NODE_351_length_4665_cov_5.720981, whole genome |
| | shotgun sequence |
| 190 | fermentation metagenome genome assembly, contig: |
| | NODE_49_length_109118_cov_31.646049, whole genome shotgun sequence |
| 191 | Dactylococcopsis salina PCC 8305, complete genome |
| 192 | Spirulina major PCC 6313 Contig40_C7, whole genome shotgun sequence |
| 193 | Candidatus Poribacteria bacterium isolate SB0675_bin_22 |
| | NODE_1111_length_21226_cov_11.928865, whole genome shotgun sequence |
| 194 | Candidatus Poribacteria bacterium isolate Plut_88885 |
| | unfiltered_Plut_88885_genomic_contig_528529, whole genome shotgun sequence |
| 195 | Microcystis aeruginosa NIES-2481, complete genome |
| 196 | Geitlerinema sp. PCC 7105 genomic scaffold Gei7105DRAFT_GPC.5, whole |
| | genome shotgun sequence |
| 197 | Microcystis sp. M_QC_C_20170808_M9Col M9Col_31, whole genome shotgun |
| | sequence |
| 198 | Halothece sp. PCC 7418, complete genome |
| 199 | Microcystis aeruginosa NIES-2549, complete genome |
| 200 | Pleurocapsa sp. PCC 7319 Pleur7319scaffold_7_Cont24, whole genome shotgun |
| | sequence |
| 201 | Microcystis aeruginosa NIES-2549, complete genome |
| 202 | Synechococcus sp. PCC 7335 scf_1103496006895 genomic scaffold, whole genome |
| | shotgun sequence |
| 203 | Moorea sp. SIO1G6 1G6_NODE_107, whole genome shotgun sequence |
| 204 | Ktedonobacter racemifer DSM 44963 strain SOSP1-21 Krac_Contig203, whole |
| | genome shotgun sequence |
| 205 | TPA_asm: Microcoleaceae bacterium UBA11344 contig_6690, whole genome |
| | shotgun sequence |
| 206 | Microcystis aeruginosa NIES-2481, complete genome |
| 207 | Planktothrix rubescens strain PCC 7821 genome assembly, contig: |
| | AAI_N _LAN_Contig_1, whole genome shotgun sequence |
| 208 | Microcystis flos-aquae TF09 NODE_1_length_1219774_cov_159.253, whole |
| | genome shotgun sequence |
| 209 | Scytonema sp. HK-05 NIES-2130_Scaffold_43, whole genome shotgun sequence |
| 210 | Scytonema sp. HK-05 NIES-2130_Scaffold_10, whole genome shotgun sequence |
| 211 | Halothece sp. PCC 7418, complete genome |
| 212 | Sulfobacillus thermosulfidooxidans strain CBAR-13 Scaffold_1_CBAR13, whole |
| | genome shotgun sequence |
| 213 | Acidithiobacillus ferrivorans WGS project CCCS000000000 data, strain CF27, |
| | contig ATN_AFERRI_Contig_8, whole genome shotgun sequence |
| 214 | Spirulina major PCC 6313 Contig40_C7, whole genome shotgun sequence |
| 215 | Desulfitobacterium hafniense TCP-A genomic scaffold DeshafDRAFT_Scaffold2.2, |
| | whole genome shotgun sequence |
| 216 | Symploca sp. SIO1A3 1A3_NODE_818, whole genome shotgun sequence |
| 217 | Dactylococcopsis salina PCC 8305, complete genome |
| 218 | Arthrospira platensis NIES-46 DNA, sequence091, whole genome shotgun sequence |
| 219 | Ktedonobacter racemifer DSM 44963 strain SOSP1-21 Krac_Contig203, whole |
| | genome shotgun sequence |
| 220 | uncultured cyanobacterium isolate I3b_bin-335 genome assembly, contig: bin- |
| | 335: 0468/1049, whole genome shotgun sequence |
| 221 | Microcoleus sp. FACHB-45 contig101, whole genome shotgun sequence |
| 222 | Ktedonobacter racemifer DSM 44963 strain SOSP1-21 Krac_Contig203, whole |
| | genome shotgun sequence |
| 223 | Acidithiobacillus ferrivorans isolate PRJEB5721 genome assembly, chromosome: |
| | AFERRI |
| 224 | Microcystis aeruginosa BS13-02 Ga0188020_100022, whole genome shotgun |
| | sequence |
| 225 | Symploca sp. SIO1C4 1C4_NODE_773, whole genome shotgun sequence |
| 226 | Microcystis aeruginosa NaRes975 Scaffold58_1, whole genome shotgun sequence |
| 227 | Calothrix rhizosoleniae SC01 genome assembly, contig: contig69601, whole genome |
| | shotgun sequence |
| 228 | Acidithiobacillus thiooxidans ATCC 19377 chromosome, complete genome |
| 229 | Westiellopsis prolifica IICB1 scaffold_1, whole genome shotgun sequence |
| 230 | Halothece sp. KZN 001 cyano_08_contig_166, whole genome shotgun sequence |
| 231 | Candidatus Poribacteria bacterium isolate PCPOR2b Ga0206366_153, whole |
| | genome shotgun sequence |
| 232 | Westiellopsis prolifica IICB1 scaffold_1, whole genome shotgun sequence |
| 233 | TPA asm: Microcoleaceae bacterium UBA11344 contig_6690, whole genome |
| | shotgun sequence |
| 234 | Hydrococcus sp. RM1_1_31 NODE_5534_length_4416_cov_2.190720, whole |
| | genome shotgun sequence |
| 235 | Microcoleus chthonoplastes PCC 7420 scf_1103659003802 genomic scaffold, whole |
| | genome shotgun sequence |
| 236 | Nostoc sp. ATCC 43529 scaffold6.1, whole genome shotgun sequence |
| 237 | Candidatus Poribacteria bacterium isolate PCPOR1 Ga0206387_1090, whole |
| | genome shotgun sequence |
| 238 | Leptolyngbya boryana IAM M-101 plasmid pLBX DNA, complete genome, strain: |
| | IAM M-101 |
| 239 | Ktedonobacter racemifer DSM 44963 strain SOSP1-21 Krac_Contig203, whole |
| | genome shotgun sequence |
| 240 | Spirulina major PCC 6313 Contig40_C7, whole genome shotgun sequence |
| 241 | Scytonema sp. HK-05 NIES-2130_Scaffold_2, whole genome shotgun sequence |
| 242 | Moorea sp. SIO3A5 3A5_NODE_46, whole genome shotgun sequence |
| 243 | Spirulina major PCC 6313 Contig40_C7, whole genome shotgun sequence |
| 244 | Spirulina major PCC 6313 Contig40_C7, whole genome shotgun sequence |
| 245 | Anabaena cylindrica FACHB-170 contig44, whole genome shotgun sequence |
| 246 | Ktedonobacter racemifer DSM 44963 strain SOSP1-21 Krac_Contig205, whole |
| | genome shotgun sequence |
| 247 | Ga0315280_10000490 |
| 248 | Calothrix desertica PCC 7102 Cal7102DRAFT_CDB.6, whole genome shotgun |
| | sequence |
| 249 | Microcystis aeruginosa KW Contig4, whole genome shotgun sequence |
| 250 | Sulfobacillus thermosulfidooxidans strain CBAR-13 Scaffold_1_CBAR13, whole |
| | genome shotgun sequence |
| 251 | Thermanaeromonas toyohensis ToBE genome assembly, chromosome: I |
| 252 | Microcystis aeruginosa KW Contig4, whole genome shotgun sequence |
| 253 | Oil field metagenome NODE_489_length_3028_cov_3.81188_ID_977, whole |
| | genome shotgun sequence |
| 254 | Cyanothece sp. BG0011 unitig_31, whole genome shotgun sequence |
| 255 | Crocosphaera watsonii WH 0005 WGS project CAQL00000000 data, contig 01056, |
| | whole genome shotgun sequence |
| 256 | Chlorogloeopsis fritschii PCC 6912 sequence18, whole genome shotgun sequence |
| 257 | Cyanobacteria bacterium SW_7_48_12 sw_7_scaffold_1695, whole genome shotgun |
| | sequence |
| 258 | Spirulina major PCC 6313 Contig40_C7, whole genome shotgun sequence |
| 259 | Planktothrix prolifica NIVA-CYA 540 contig00111, whole genome shotgun |
| | sequence |
| 260 | Microcystis aeruginosa KW Contig4, whole genome shotgun sequence |
| 261 | Cyanobacteria bacterium J083 k99_1471286, whole genome shotgun sequence |
| 262 | Coleofasciculus chthonoplastes PCC 7420 ctg_1103659003575, whole genome |
| | shotgun sequence |
| 263 | Ga0315284_10003385 |
| 264 | Moorea sp. SIO4G2 4G2_NODE_2420, whole genome shotgun sequence |
| 265 | Microcystis aeruginosa NIES-2519 DNA, contig_1, whole genome shotgun sequence |
| 266 | Pelotomaculum thermopropionicum SI DNA, complete genome |
| 267 | Hydrocoleum sp. CS-953, whole genome shotgun sequence |
| 268 | Anabaena sp. 4-3 contig107, whole genome shotgun sequence |
| 269 | Caldicellulosiruptor hydrothermalis 108, complete genome |
| 270 | Candidatus Poribacteria bacterium bin44 |
| | NODE_2286_length_30008_cov_19.1247_ID_4571, whole genome shotgun |
| | sequence |
| 271 | Nostoc sp. ATCC 53789 plasmid pNsp_b, complete sequence |
| 272 | Ga0315273_10074057 |
| 273 | sediment metagenome genome assembly, contig: |
| | NODE_2_length_64137_cov 4.613995, whole genome shotgun sequence |
| 274 | Microcystis panniformis Mp_MB_F_20051200_S6 S6_49, whole genome shotgun |
| | sequence |
| 275 | Microcystis aeruginosa 9717 WGS project CAII01000000 data, contig |
| | AAI_B_2196_677, whole genome shotgun sequence |
| 276 | Mastigocladus laminosus UU774 scaffold_2, whole genome shotgun sequence |
| 277 | Symploca sp. SIO2B6 2B6_NODE_1, whole genome shotgun sequence |
| 278 | Brasilonema bromeliae SPC951 NODE_2093_length_16008_cov_5.537140, whole |
| | genome shotgun sequence |
| 279 | Microcystis aeruginosa KW Contig5, whole genome shotgun sequence |
| 280 | Planktothrix mougeotii NIVA-CYA 405 contig00192, whole genome shotgun |
| | sequence |
| 281 | Calothrix rhizosoleniae SC01 genome assembly, contig: contig69601, whole genome |
| | shotgun sequence |
| 282 | Methanoculleus sp. MAB1 isolate Methanoculleus sp MAB1 genome assembly, |
| | chromosome: chrI |
| 283 | Ga0315284_10000757 |
| 284 | Synechococcus sp. PCC 7335 ctg_1103496006870, whole genome shotgun sequence |
| 285 | Westiellopsis prolifica IICB1 scaffold_2, whole genome shotgun sequence |
| 286 | Planktothrix mougeotii NIVA-CYA 405 genomic scaffold scaffold00001, whole |
| | genome shotgun sequence |
| 287 | Calothrix desertica PCC 7102 Cal7102DRAFT_CDB.6, whole genome shotgun |
| | sequence |
| 288 | Anabaena sp. AL93 isolate WA93 214, whole genome shotgun sequence |
| 289 | Aphanizomenon flos-aquae NIES-81 genomic scaffold scaffold00002, whole |
| | genome shotgun sequence |
| 290 | Symploca sp. SIO2B6 2B6_NODE_19, whole genome shotgun sequence |
| 291 | cyanobacterium TDX16 genomic scaffold Scaffold113, whole genome shotgun |
| | sequence |
| 292 | Spirulina major PCC 6313 Contig40_C5, whole genome shotgun sequence |
| 293 | Ga0315280_10053983 |
| 294 | Leptolyngbya valderiana BDU 20041 contig00137, whole genome shotgun sequence |
| 295 | Moorea sp. SIO4A5 4A5_NODE_3, whole genome shotgun sequence |
| 296 | Microcystis aeruginosa KW Contig4, whole genome shotgun sequence |
| 297 | Westiellopsis prolifica IICB1 scaffold_2, whole genome shotgun sequence |
| 298 | Candidatus Poribacteria bacterium isolate PCPOR2 Ga0207196_157, whole genome |
| | shotgun sequence |
| 299 | Oscillatoriales cyanobacterium isolate PH2015_05S_45 1152 |
| | PH2015_05S_scaffold_123, whole genome shotgun sequence |
| 300 | Desulfovirgula thermocuniculi DSM 16036 G454DRAFT_scaffold00006.6_C, whole |
| | genome shotgun sequence |
| 301 | Phormidesmis priestleyi isolate ULC027bin1 scaffold62_size17395, whole genome |
| | shotgun sequence |
| 302 | Ga0315273_10097322 |
| 303 | Microcystis aeruginosa W11-06 Ga0188003_10150, whole genome shotgun |
| | sequence |
| 304 | Microcystis aeruginosa BLCCF108 NODE_334_length_13058_cov_116.817888, |
| | whole genome shotgun sequence |
| 305 | Ga0315284_10006947 |
| 306 | Ga0373630_0001176 |
| 307 | Acaryochloris sp. CCMEE 5410 contig00452, whole genome shotgun sequence |
| 308 | Ga0315294_10064742 |
| 309 | Ga0315280_10007244 |
| 310 | Crocosphaera watsonii WH 8502 WGS project CAQK00000000 data, contig 00305, |
| | whole genome shotgun sequence |
| 311 | Ga0373629_0115667 |
| 312 | Ga0315281_10085784 |
| 313 | Ga0315284_10138768 |
| 314 | Ga0315280_10000925 |
| 315 | TPA_asm: Synechococcus sp. isolate SpSt-164 Ga0101943_1003474, whole genome |
| | shotgun sequence |
| 316 | TPA_asm: Synechococcus sp. isolate SpSt-164 Ga0101943_1001739, whole genome |
| | shotgun sequence |
| 317 | Microcystis aeruginosa NIES-4264 DNA, contig_35, whole genome shotgun |
| | sequence |
| 318 | Candidatus Poribacteria bacterium isolate PCPOR4 Ga0207198_1109, whole |
| | genome shotgun sequence |
| 319 | Ga0315298_1012135 |
| 320 | Chlorogloeopsis fritschii PCC 6912 contig00060, whole genome shotgun sequence |
| 321 | Ga0373626_0016898 |
| 322 | Tolypothrix bouteillei VB521301 scaffold_0, whole genome shotgun sequence |
| 323 | Ardenticatenales bacterium isolate MGR_bin47 SD2897-2912_k127_3100996, |
| | whole genome shotgun sequence |
| 324 | Symploca sp. SIO1C4 1C4_NODE_223, whole genome shotgun sequence |
| 325 | Candidatus Poribacteria bacterium isolate SB0669_bin_10 |
| | NODE_301_length_23714_cov_8.675726, whole genome shotgun sequence |
| 326 | Candidatus Desulfofervidus auxilii strain HS1 genome |
| 327 | Candidatus Poribacteria bacterium isolate SB0669_bin_10 |
| | NODE_388_length_21048_cov_8.115277, whole genome shotgun sequence |
| 328 | Planktothrix rubescens strain 7821 genome assembly, scaffold: |
| | AAI_N_PLAN_scaffold3, whole genome shotgun sequence |
| 329 | Microcystis aeruginosa KW Contig4, whole genome shotgun sequence |
| 330 | Nostoc sp. ATCC 53789 scaffold95.1, whole genome shotgun sequence |
| 331 | TPA_asm: Richelia sp. UBA3957 UBA3957_contig_1031, whole genome shotgun |
| | sequence |
| 332 | Candidatus Poribacteria bacterium isolate SB0662_bin_35 |
| | NODE_1411_length_31134_cov_34.441938, whole genome shotgun sequence |
| 333 | Arthrospira sp. TJSD091 Contig142, whole genome shotgun sequence |
| 334 | Microcystis wesenbergii LE013-01 Ga0066240_1118, whole genome shotgun |
| | sequence |
| 335 | Microcystis aeruginosa 9717 WGS project CAII01000000 data, contig |
| | AAI_B_2196_437, whole genome shotgun sequence |
| 336 | Microcystis flos-aquae Mf_QC_C_20070823_S20T S20T_177, whole genome |
| | shotgun sequence |
| 337 | TPA_asm: Methanoculleus sp. UBA303 UBA303_contig_137, whole genome |
| | shotgun sequence |
| 338 | metagenome genome assembly, contig: NODE_759_length_35023_cov_5.454444, |
| | whole genome shotgun sequence |
| 339 | Cyanobacteria bacterium isolate GSL.Bin21 |
| | NODE_5139_length_10309_cov_0.604633, whole genome shotgun sequence |
| 340 | Ga0315277_10000379 |
| 341 | Microcystis aeruginosa KW Contig4, whole genome shotgun sequence |
| 342 | Microcystis aeruginosa 9701 WGS project CAIQ01000000 data, contig |
| | AAI_K_2204_21, whole genome shotgun sequence |
| 343 | Ga0373630_0073123 |
| 344 | Moorea sp. SIO3A5 3A5_NODE_13, whole genome shotgun sequence |
| 345 | Thermincola ferriacetica strain Z-0001 Tfer_ctg04, whole genome shotgun sequence |
| 346 | Microcystis aeruginosa NIES-1211 DNA, contig 6, whole genome shotgun sequence |
| 347 | Candidatus Poribacteria bacterium isolate SB0663_bin_6 |
| | NODE_466_length_15371_cov_6.406242, whole genome shotgun sequence |
| 348 | Anabaena sp. UHCC 0253 XSP2A_scaffold00001_cov, whole genome shotgun |
| | sequence |
| 349 | Ga0315294_10040325 |
| 350 | Planktothrix rubescens strain PCC 7821 genome assembly, contig: |
| | AAI_N_PLAN_Contig_6, whole genome shotgun sequence |
| 351 | Microcystis aeruginosa PCC 9443 genomic scaffold, AAI_C_2197_scaffold67, |
| | whole genome shotgun sequence |
| 352 | Microcystis aeruginosa TA09 TA09_23, whole genome shotgun sequence |
| 353 | Ga0373630_0000642 |
| 354 | Sulfobacillus sp. DSM 109850 NODE_109_length_10971_cov_117.928952, whole |
| | genome shotgun sequence |
| 355 | Ga0315280_10001324 |
| 356 | Microcystis aeruginosa DA14 NODE_13_length_619060_cov_421.444, whole |
| | genome shotgun sequence |
| 357 | Anabaena variabilis FACHB-171 contig53, whole genome shotgun sequence |
| 358 | Microcoleus chthonoplastes PCC 7420 scf_1103659003820 genomic scaffold, whole |
| | genome shotgun sequence |
| 359 | Microcoleus sp. T1-bin1 k141_138926_length_3681_cov_8.0000, whole genome |
| | shotgun sequence |
| 360 | Candidatus Poribacteria bacterium isolate Plut_88864 |
| | filtered_Plut_88864_genomic_contig_16625, whole genome shotgun sequence |
| 361 | coral metagenome genome assembly, contig: |
| | NODE_156_length_19320_cov_12.549810, whole genome shotgun sequence |
| 362 | Planktothrix mougeotii NIVA-CYA 405 genomic scaffold scaffold00002, whole |
| | genome shotgun sequence |
| 363 | Methanosarcinales archaeon isolate B39_G2 B39_Guay2_scaffold_00908, whole |
| | genome shotgun sequence |
| 364 | Microcystis sp. T1-4 WGS project CAIP01000000 data, contig AAI_I_2203_23, |
| | whole genome shotgun sequence |
| 365 | TPA_asm: Cyanobacteria bacterium UBA11162 contig_7374, whole genome |
| | shotgun sequence |
| 366 | Microcoleus chthonoplastes PCC 7420 scf_1103659003791 genomic scaffold, whole |
| | genome shotgun sequence |
| 367 | Microcoleus sp. SU_5_6 NODE_658_length_15713_cov_3.039843, whole genome |
| | shotgun sequence |
| 368 | Anabaena azotica FACHB-119 contig15, whole genome shotgun sequence |
| 369 | Crocosphaera sp. isolate DT_26 DT-Crocosphaera-1_scaffold_67, whole genome |
| | shotgun sequence |
| 370 | TPA_asm: Cyanobacteria bacterium UBA9273 contig_1024, whole genome shotgun |
| | sequence |
| 371 | TPA_asm: Deltaproteobacteria bacterium UBA4796 UBA4796_contig_73815, |
| | whole genome shotgun sequence |
| 372 | Ga0315284_10078857 |
| 373 | Ga0315284_10003686 |
| 374 | Ga0315284_10024242 |
| 375 | Anabaena cylindrica FACHB-318 contig46, whole genome shotgun sequence |
| 376 | Moorea sp. SIO4G3 4G3_NODE_99, whole genome shotgun sequence |
| 377 | Desulfitobacterium hafniense TCP-A DeshafDRAFT_Scaffold2.2_C7, whole |
| | genome shotgun sequence |
| 378 | Cyanobacteria bacterium QS_7_48_42 qs_7_scaffold_862, whole genome shotgun |
| | sequence |
| 379 | Cyanobacteria bacterium isolate GSL.Bin1 NODE_5738_length_9529_cov_5.21131, |
| | whole genome shotgun sequence |
| 380 | Cyanobacteria bacterium CRU_2_1 NODE_125_length_46571_cov_4.74772, whole |
| | genome shotgun sequence |
| 381 | uncultured cyanobacterium isolate A5_bin-0177 genome assembly, contig: bin- |
| | 0177: 257/358, whole genome shotgun sequence |
| 382 | Moorea sp. SIO3G5 3G5_NODE_1005, whole genome shotgun sequence |
| 383 | wastewater metagenome genome assembly, contig: |
| | NODE_9_length_147903_cov_62.363265, whole genome shotgun sequence |
| 384 | Moorea sp. SIOASIH ASIH_NODE_1, whole genome shotgun sequence |
| 385 | Moorea sp. SIOASIH ASIH_NODE_2, whole genome shotgun sequence |
| 386 | Ga0315279_10000169 |
| 387 | Richelia sp. RM2_1_2 NODE_77_length_54106_cov_31.666926, whole genome |
| | shotgun sequence |
| 388 | Microcystis wesenbergii TW10 TW10_41, whole genome shotgun sequence |
| 389 | wastewater metagenome genome assembly MBR_assembly, scaffold 60651, whole |
| | genome shotgun sequence |
| 390 | TPA_asm: Cyanobacteria bacterium UBA11371 contig_504, whole genome shotgun |
| | sequence |
| 391 | Prochlorothrix hollandica PCC 9006 = CALU 1027 contig_1, whole genome shotgun |
| | sequence |
| 392 | Leptolyngbya boryana PCC 6306 LepboDRAFT_LPC.2_C8, whole genome shotgun |
| | sequence |
| 393 | Ga0373628_0001310 |
| 394 | Moorea sp. SIO318 318_NODE_22, whole genome shotgun sequence |
| 395 | Candidatus Poribacteria bacterium WGA-4E POR4E_contig00010standard_C, whole |
| | genome shotgun sequence |
| 396 | Geitlerinema sp. FC II Abyss71_541 len: 34374, whole genome shotgun sequence |
| 397 | Mastigocladus laminosus UU774 strain 74 scaffold_40, whole genome shotgun |
| | sequence |
| 398 | Moorea sp. SIO3I7 3I7_NODE_59, whole genome shotgun sequence |
| 399 | Microcystis aeruginosa NIES-44 DNA, contig: contig2_19, strain: NIES-44, whole |
| | genome shotgun sequence |
| 400 | Moorea sp. SIO4G3 4G3_NODE_14, whole genome shotgun sequence |
| 401 | Ga0373627_0019696 |
| 402 | Candidatus Poribacteria bacterium isolate SB0678_bin_11 |
| | NODE_3814_length_6294_cov_7.163808, whole genome shotgun sequence |
| 403 | Scytonema sp. HK-05 NIES-2130_Scaffold_97, whole genome shotgun sequence |
| 404 | Ga0315294_10131761 |
| 405 | Candidatus Poribacteria bacterium isolate PCPOR2b Ga0206366_152, whole |
| | genome shotgun sequence |
| 406 | Ga0315273_10003313 |
| 407 | Candidatus Poribacteria bacterium isolate PCPOR2 Ga0207196_147, whole genome |
| | shotgun sequence |
| 408 | Microcystis sp. 0824 DNA, scaffold: scaffold71, strain: 0824, whole genome shotgun |
| | sequence |
| 409 | Microcystis aeruginosa 9808 WGS project CAIN01000000 data, contig |
| | AAI_G_2201_209, whole genome shotgun sequence |
| 410 | TPA_asm: Cyanobacteria bacterium UBA11148 contig_205, whole genome shotgun |
| | sequence |
| 411 | Moorea sp. SIOASIH ASIH_NODE_5, whole genome shotgun sequence |
| 412 | Microcystis sp. 0824 DNA, scaffold: scaffold71, strain: 0824, whole genome shotgun |
| | sequence |
| 413 | Planktothrix agardhii NIVA-CYA 56/3 genomic scaffold scaffold00001, whole |
| | genome shotgun sequence |
| 414 | Nostoc sp. PCC 7120 = FACHB-418 strain PCC 7120 sequence036, whole genome |
| | shotgun sequence |
| 415 | Anabaena sp. UHCC 0253 XSP2A_scaffold00001_cov, whole genome shotgun |
| | sequence |
| 416 | Oscillatoriales cyanobacterium isolate PH2015_08U_46_180 |
| | PH2015_08U_scaffold_98, whole genome shotgun sequence |
| 417 | Candidatus Poribacteria bacterium isolate PCPOR4 Ga0207198_1202, whole |
| | genome shotgun sequence |
| 418 | Calothrix sp. PCC 7103 genomic scaffold Cal7103DRAFT_CPM.1, whole genome |
| | shotgun sequence |
| 419 | Geitlerinema sp. PCC 9228 Ga0115370_1196, whole genome shotgun sequence |
| 420 | Oscillatoriales cyanobacterium isolate PH2015_01U_44_212 |
| | PH2015_01U_scaffold_745, whole genome shotgun sequence |
| 421 | Candidatus Poribacteria bacterium isolate PCPOR4 Ga0207198_1210, whole |
| | genome shotgun sequence |
| 422 | Scytonema tolypothrichoides VB-61278 scaffold_000, whole genome shotgun |
| | sequence |
| 423 | wastewater metagenome genome assembly, contig: |
| | NODE_80_length_54656_cov_7.142946, whole genome shotgun sequence |
| 424 | Prochlorothrix hollandica PCC 9006 = CALU 1027 contig_8, whole genome shotgun |
| | sequence |
| 425 | Ga0315284_10000005 |
| 426 | Mastigocoleus testarum BC008 YY1DRAFT_scaffold_65.66_C, whole genome |
| | shotgun sequence |
| 427 | Oscillatoriales cyanobacterium isolate PH2015_06S_45_83 |
| | PH2015_06S_scaffold_1397, whole genome shotgun sequence |
| 428 | wastewater metagenome genome assembly MBR_assembly, scaffold 53832, whole |
| | genome shotgun sequence |
| 429 | Spirulina subsalsa PCC 9445 Contig203_C, whole genome shotgun sequence |
| 430 | sediment metagenome genome assembly, contig: |
| | NODE_6181_length_5365_cov_4.195726, whole genome shotgun sequence |
| 431 | Microcystis phage Ma-LMM01 DNA, complete genome |
| 432 | Ga0373625_0000082 |
| 433 | Richelia sp. RM1_1_1 NODE_158_length_58252_cov_56.257738, whole genome |
| | shotgun sequence |
| 434 | Moorea sp. SIO3G5 3G5_NODE_511, whole genome shotgun sequence |
| 435 | TPA_asm: Synechococcus sp. isolate SpSt-164 Ga0101943_1003474, whole genome |
| | shotgun sequence |
| 436 | Burkholderiales bacterium isolate ES-bin-76 ES-bin-76-contig-k141_11549369, |
| | whole genome shotgun sequence |
| 437 | Limnoraphis robusta CS-951 contig188, whole genome shotgun sequence |
| 438 | Ga0373625_0162898 |
| 439 | Ga0307928_10003825 |
| 440 | Chloroflexi bacterium isolate B68_G16 B68_Guay16_scaffold_01376, whole |
| | genome shotgun sequence |
| 441 | Aliterella atlantica CENA595 contig_243, whole genome shotgun sequence |
| 442 | Spirulina major PCC 6313 Contig40_C3, whole genome shotgun sequence |
| 443 | Prochlorothrix hollandica PCC 9006 genomic scaffold Pro9006DRAFT_Contig5.9, |
| | whole genome shotgun sequence |
| 444 | Moorea sp. SIO3B2 3B2_NODE_16, whole genome shotgun sequence |
| 445 | Ga0315280_10050637 |
| 446 | Ga0373630_0000013 |
| 447 | Planktothrix rubescens strain 7821 genome assembly, scaffold: |
| | AAI_N_PLAN scaffold1, whole genome shotgun sequence |
| 448 | uncultured cyanobacterium isolate B-1_bin-000 genome assembly, contig: bin- |
| | 000: 459/625, whole genome shotgun sequence |
| 449 | Ga0315280_10061026 |
| 450 | Ga0315298_1008157 |
| 451 | Ga0315294_10133405 |
| 452 | Ga0373630_0072462 |
| 453 | Planktothrix mougeotii NIVA-CYA 405 genomic scaffold scaffold00005, whole |
| | genome shotgun sequence |
| 454 | Crocosphaera watsonii WH0402 WGS project CAQN00000000 data, contig 01993, |
| | whole genome shotgun sequence |
| 455 | Scytonema sp. HK-05 NIES-2130_Scaffold_20, whole genome shotgun sequence |
| 456 | Ga0315285_10055136 |
| 457 | Microcystis aeruginosa NIES-1211 DNA, contig 6, whole genome shotgun sequence |
| 458 | Planktothrix rubescens strain 7821 genome assembly, scaffold: |
| | AAI_N_PLAN scaffold4, whole genome shotgun sequence |
| 459 | Moorea sp. SIOASIH ASIH_NODE_5, whole genome shotgun sequence |
| 460 | Aphanothece sacrum FPU1 DNA, contig: ASFPU1_contig_001, whole genome |
| | shotgun sequence |
| 461 | Microcoleus chthonoplastes PCC 7420 scf_1103659003831 genomic scaffold, whole |
| | genome shotgun sequence |
| 462 | Scytonema hofmannii PCC 7110 Scaffold1_37, whole genome shotgun sequence |
| 463 | Planktothrix agardhii NIVA-CYA 34 contig00043, whole genome shotgun sequence |
| 464 | Oscillatoriales cyanobacterium isolate PH2015_02U_45_393 |
| | PH2015_02U_scaffold_32, whole genome shotgun sequence |
| 465 | TPA_asm: Cyanobacteria bacterium UBA8553 contig_175, whole genome shotgun |
| | sequence |
| 466 | Scytonema sp. HK-05 NIES-2130_Scaffold_125, whole genome shotgun sequence |
| 467 | Microcystis aeruginosa NIES-2519 DNA, contig_1, whole genome shotgun sequence |
| 468 | Scytonema tolypothrichoides VB-61278 scaffold_0, whole genome shotgun |
| | sequence |
| 469 | Microcystis aeruginosa KW Contig5, whole genome shotgun sequence |
| 470 | Ga0315284_10013381 |
| 471 | Geitlerinema sp. PCC 7105 Gei7105DRAFT_GPC.4_C33, whole genome shotgun |
| | sequence |
| 472 | Microcystis aeruginosa NIES-2520 DNA, contig_62, whole genome shotgun |
| | sequence |
| 473 | Microcystis aeruginosa 11-30S32 DNA, 11-30S32contig365, whole genome shotgun |
| | sequence |
| 474 | Oscillatoriales cyanobacterium isolate PH2015_08D_46_1646 |
| | PH2015_08D_scaffold_3729, whole genome shotgun sequence |
| 475 | Scytonema sp. RU_4_4 NODE_633_length_27381_cov_17.449402, whole genome |
| | shotgun sequence |
| 476 | Moorea sp. SIO3E8 3E8_NODE_56, whole genome shotgun sequence |
| 477 | Scytonema sp. UIC 10036 c00130_NODE_13 . . . , whole genome shotgun sequence |
| 478 | metagenomes genome assembly, contig: NODE_1186_length_14052_cov_2.372723, |
| | whole genome shotgun sequence |
| 479 | Mastigocladus laminosus UU774 scaffold_14, whole genome shotgun sequence |
| 480 | Ga0373627_0087747 |
| 481 | uncultured Microcoleus sp. isolate AVDCRST_MAG84 genome assembly, contig: |
| | NODE2305, whole genome shotgun sequence |
| 482 | sediment metagenome genome assembly, contig: |
| | NODE_105_length_5270_cov_4.762416, whole genome shotgun sequence |
| 483 | Ga0315280_10033276 |
| 484 | Leptolyngbya sp. FACHB-402 contig17, whole genome shotgun sequence |
| 485 | Ga0307928_10002244 |
| 486 | Prochlorothrix hollandica PCC 9006 genomic scaffold Pro9006DRAFT_Contig10.1, |
| | whole genome shotgun sequence |
| 487 | Candidatus Poribacteria bacterium bin44 |
| | NODE_2499_length_27701_cov_18.0525_ID_4997, whole genome shotgun |
| | sequence |
| 488 | Microcoleus chthonoplastes PCC 7420 scf_1103659003820 genomic scaffold, whole |
| | genome shotgun sequence |
| 489 | Scytonema sp. HK-05 NIES-2130_Scaffold 72, whole genome shotgun sequence |
| 490 | freshwater metagenome genome assembly, contig: 3777, whole genome shotgun |
| | sequence |
| 491 | Tolypothrix campylonemoides VB511288 scaffold_002, whole genome shotgun |
| | sequence |
| 492 | Candidatus Poribacteria bacterium isolate PCPOR4 Ga0207198_1084, whole |
| | genome shotgun sequence |
| 493 | Moorea sp. SIO4G3 4G3_NODE_88, whole genome shotgun sequence |
| 494 | Anabaena sp. 4-3 contig107, whole genome shotgun sequence |
| 495 | Moorea sp. SIO3F7 3F7_NODE_23, whole genome shotgun sequence |
| 496 | Moorea producens 3L ctg45835, whole genome shotgun sequence |
| 497 | freshwater metagenome genome assembly, contig: 3777, whole genome shotgun |
| | sequence |
| 498 | Spirulina sp. isolate S17.Bin059 Scaffold_8, whole genome shotgun sequence |
| 499 | Planktothrix agardhii NIVA-CYA 56/3 genomic scaffold scaffold00007, whole |
| | genome shotgun sequence |
| 500 | Ga0315284_10121961 |
| 501 | Moorea sp. SIO3A5 3A5_NODE_11, whole genome shotgun sequence |
| 502 | Candidatus Poribacteria bacterium isolate Plut_88888 |
| | unfiltered_Plut_88888_genomic_contig_378005, whole genome shotgun sequence |
| 503 | Okeania sp. SIO2B3 2B3_NODE_8, whole genome shotgun sequence |
| 504 | Microcoleus chthonoplastes PCC 7420 scf_1103659003791 genomic scaffold, whole |
| | genome shotgun sequence |
| 505 | Candidatus Poribacteria bacterium isolate PCPOR1 Ga0206387_1011, whole |
| | genome shotgun sequence |
| 506 | Scytonema sp. HK-05 NIES-2130_Scaffold_6, whole genome shotgun sequence |
| 507 | Chlorogloea sp. CCALA 695 NODE_68_length_40204_cov_6.81018_ID_66494, |
| | whole genome shotgun sequence |
| 508 | Microcystis panniformis Mp_GB_SS_20050300_S99 S99_68, whole genome |
| | shotgun sequence |
| 509 | Leptolyngbya sp. SIO1E4 1E4_NODE_9, whole genome shotgun sequence |
| 510 | Microcystis aeruginosa PCC 9809 genomic scaffold, AAI_H_2202_scaffold61, |
| | whole genome shotgun sequence |
| 511 | Microcystis aeruginosa NIES-3804 DNA, sequence020, whole genome shotgun |
| | sequence |
| 512 | Scytonema sp. HK-05 NIES-2130_Scaffold_7, whole genome shotgun sequence |
| 513 | Candidatus Hydrothermarchaeota archaeon isolate B51_G15 |
| | B51_Guay15_scaffold_11912, whole genome shotgun sequence |
| 514 | Ga0373625_0000082 |
| 515 | Tolypothrix campylonemoides VB511288 scaffold_2, whole genome shotgun |
| | sequence |
| 516 | Ga0315294_10001891 |
| 517 | Microcystis wesenbergii Mw_QC_B_20070930_S4D S4D_10, whole genome |
| | shotgun sequence |
| 518 | Ga0373625_0034772 |
| 519 | Mastigocladus laminosus UU774 strain 74 scaffold_2, whole genome shotgun |
| | sequence |
| 520 | Moorea sp. SIO3I6 3I6_NODE_1, whole genome shotgun sequence |
| 521 | Planktothrix agardhii NIVA-CYA 56/3 contig00124, whole genome shotgun |
| | sequence |
| 522 | Nostoc sp. ATCC 53789 scaffold90.1, whole genome shotgun sequence |
| 523 | Symploca sp. SIO3C6 3C6_NODE_17, whole genome shotgun sequence |
| 524 | Microcystis flos-aquae DF17 NODE_180_length_69088_cov_289.53, whole genome |
| | shotgun sequence |
| 525 | Moorea sp. SIO3A2 3A2_NODE_11, whole genome shotgun sequence |
| 526 | Trichocoleus sp. FACHB-46 contig33, whole genome shotgun sequence |
| 527 | Planktothrix agardhii NIVA-CYA 34 contig00087, whole genome shotgun sequence |
| 528 | Arthrospira maxima CS-328 ctg6, whole genome shotgun sequence |
| 529 | Candidatus Poribacteria bacterium isolate PCPOR4 Ga0207198_1209, whole |
| | genome shotgun sequence |
| 530 | Candidatus Poribacteria bacterium WGA-3G POR3G_contig_6.7_C, whole genome |
| | shotgun sequence |
| 531 | uncultured cyanobacterium isolate I3_bin-238 genome assembly, contig: bin- |
| | 238: 681/866, whole genome shotgun sequence |
| 532 | Trichormus variabilis SAG 1403-4b sequence01, whole genome shotgun sequence |
| 533 | Ardenticatenales bacterium isolate MGR_bin47 SD2897-2912_k127_6180070, |
| | whole genome shotgun sequence |
| 534 | fermentation metagenome genome assembly, contig: |
| | NODE_485_length_50386_cov_69.906360, whole genome shotgun sequence |
| 535 | Spirulina subsalsa PCC 9445 Contig210_C2, whole genome shotgun sequence |
| 536 | Coleofasciculus chthonoplastes PCC 7420 ctg_1103659003746, whole genome |
| | shotgun sequence |
| 537 | Candidatus Poribacteria bacterium isolate SB0663_bin_6 |
| | NODE_4644_length_3525_cov_7.369452, whole genome shotgun sequence |
| 538 | Arthrospira platensis str. Paraca isolate UASWS Contig183, whole genome shotgun |
| | sequence |
| 539 | Ga0373629_0094687 |
| 540 | Ga0315277_10158218 |
| 541 | Gut metagenome scaffold37567_1, whole genome shotgun sequence |
| 542 | Richelia sp. SL_2_1 NODE_95_length_50065_cov_8.922143, whole genome |
| | shotgun sequence |
| 543 | Coleofasciculus chthonoplastes PCC 7420 ctg_1103659003746, whole genome |
| | shotgun sequence |
| 544 | Cyanobacteria bacterium QH_2_48_84 qh_2_scaffold_146, whole genome shotgun |
| | sequence |
| 545 | Symploca sp. SIO2C1 2C1_NODE_125, whole genome shotgun sequence |
| 546 | Ga0315279_10012021 |
| 547 | Crocosphaera watsonii WH 8502 WGS project CAQK00000000 data, contig 00305, |
| | whole genome shotgun sequence |
| 548 | Microcystis aeruginosa PCC 7005 Mic7005contig745, whole genome shotgun |
| | sequence |
| 549 | Oscillatoriales cyanobacterium isolate PH2015_12D_45_607 |
| | PH2015_12D_scaffold_712, whole genome shotgun sequence |
| 550 | Candidatus Chloroploca asiatica strain B7-9 |
| | NODE_14_length_96467_cov_78.3642_ID_198493, whole genome shotgun |
| | sequence |
| 551 | Ga0315296_10002743 |
| 552 | Microcystis wesenbergii FACHB-1317 contig99, whole genome shotgun sequence |
| 553 | Mastigocladopsis repens PCC 10914 Mas10914DRAFT_scaffold1.1_C5, whole |
| | genome shotgun sequence |
| 554 | Moorea producens 3L ctg45886, whole genome shotgun sequence |
| 555 | Ga0373628_0039306 |
| 556 | Acidithiobacillus thiooxidans strain CLST scaffold00011, whole genome shotgun |
| | sequence |
| 557 | Candidatus Poribacteria bacterium isolate Plut_88880 |
| | unfiltered_Plut_88880_genomic_contig_231928, whole genome shotgun sequence |
| 558 | Aphanothece sacrum FPU1 DNA, contig: ASFPU1_contig_001, whole genome |
| | shotgun sequence |
| 559 | Methanomicrobiales archaeon isolate AS21ysBPME_11 103734_AS21, whole |
| | genome shotgun sequence |
| 560 | Pleurocapsa sp. CCALA 161 NODE_15_length_65967_cov_11.0301_ID_47581, |
| | whole genome shotgun sequence |
| 561 | Candidatus Poribacteria bacterium isolate SB0663_bin_6 |
| | NODE_888_length_10879_cov_6.783814, whole genome shotgun sequence |
| 562 | Ga0315285_10002699 |
| 563 | Chloroflexi bacterium isolate CF_117 14_0929_09_20cm_scaffold_32114, whole |
| | genome shotgun sequence |
| 564 | Microcystis aeruginosa W11-06 Ga0188003_10305, whole genome shotgun |
| | sequence |
| 565 | TPA_asm: Synechococcus sp. isolate SpSt-285 Ga0101945_1000396, whole genome |
| | shotgun sequence |
| 566 | Oscillatoriales cyanobacterium isolate PH2015_07U_46_236 |
| | PH2015_07U_scaffold_20, whole genome shotgun sequence |
| 567 | coral metagenome genome assembly, contig: |
| | NODE_34_length_47446_cov_16.642467, whole genome shotgun sequence |
| 568 | Anabaena sp. PCC 7108 Ana7108scaffold_2_Cont3, whole genome shotgun |
| | sequence |
| 569 | Anabaena sp. CA = ATCC 33047 contig081, whole genome shotgun sequence |
| 570 | Geitlerinema sp. PCC 7105 genomic scaffold Gei7105DRAFT_GPC.4, whole |
| | genome shotgun sequence |
| 571 | Planktothrix agardhii NIVA-CYA 56/3 contig00014, whole genome shotgun |
| | sequence |
| 572 | Leptolyngbya boryana dg5 plasmid pLBX DNA, complete genome, strain: dg5 |
| 573 | bioreactor sludge metagenome genome assembly, contig: |
| | NODE_19_length_148633_cov_33.775869, whole genome shotgun sequence |
| 574 | Calothrix sp. FACHB-168 contig13, whole genome shotgun sequence |
| 575 | Oscillatoriales cyanobacterium isolate PH2015_09S_45_247 |
| | PH2015_09S_scaffold_4, whole genome shotgun sequence |
| 576 | Calothrix sp. CSU_2_0 NODE_2568_length_6893_cov_4.74682, whole genome |
| | shotgun sequence |
| 577 | Aliterella atlantica CENA595 contig_243, whole genome shotgun sequence |
| 578 | Oscillatoriales cyanobacterium RU_3_3 NODE_1980_length_14615_cov_2.286996, |
| | whole genome shotgun sequence |
| 579 | Microcystis aeruginosa NIES-88 scaffold3, whole genome shotgun sequence |
| 580 | Viral metagenome NODE_2825_length_39530_cov_3.55673, whole genome |
| | shotgun sequence |
| 581 | Acaryochloris sp. CCMEE 5410 contig00452, whole genome shotgun sequence |
| 582 | TPA_asm: Cyanobacteria bacterium UBA11370 contig_1246, whole genome |
| | shotgun sequence |
| 583 | Freshwater metagenome, whole genome shotgun sequence |
| 584 | Microcoleus sp. SU_5_6 NODE_1147_length_10793_cov_2.600975, whole genome |
| | shotgun sequence |
| 585 | Candidatus Poribacteria bacterium isolate SB0663_bin 6 |
| | NODE_1215_length_9091_cov_6.427291, whole genome shotgun sequence |
| 586 | Mastigocladopsis repens PCC 10914 Mas10914DRAFT_scaffold1.1_C9, whole |
| | genome shotgun sequence |
| 587 | metagenome genome assembly, contig: NODE_2330_length_23654_cov_8.032544, |
| | whole genome shotgun sequence |
| 588 | Symploca sp. SIO3C6 3C6_NODE_23, whole genome shotgun sequence |
| 589 | Microcystis wesenbergii Mw_QC_B_20070930_S4 S4_59, whole genome shotgun |
| | sequence |
| 590 | Ga0315277_10009605 |
| 591 | Oscillatoriales cyanobacterium isolate PH2015_07U_46_236 |
| | PH2015_07U_scaffold_61, whole genome shotgun sequence |
| 592 | Methanocalculus sp. isolate CSSed165cm_604R1 CSSed16-5cm-421, whole genome |
| | shotgun sequence |
| 593 | Cyanobacteria bacterium QH_10_48_56 qh_10_scaffold_929, whole genome |
| | shotgun sequence |
| 594 | Microcystis aeruginosa Ma_SC_T_19800800_S464 S464_89, whole genome |
| | shotgun sequence |
| 595 | Mastigocladus laminosus UU774 scaffold_3, whole genome shotgun sequence |
| 596 | Microcystis panniformis Mp_MB_F_20080800_S26D S26D_11, whole genome |
| | shotgun sequence |
| 597 | Oscillatoriales cyanobacterium isolate PH2015_07U_46_236 |
| | PH2015_07U_scaffold_188, whole genome shotgun sequence |
| 598 | Ga0373627_0079985 |
| 599 | Mastigocladus laminosus UU774 scaffold_4, whole genome shotgun sequence |
| 600 | Moorea sp. SIO1G6 1G6_NODE_49, whole genome shotgun sequence |
| 601 | Geitlerinema sp. PCC 7105 Gei7105DRAFT_GPC.5_C44, whole genome shotgun |
| | sequence |
| 602 | Arthrospira sp. TJSD091 Contig142, whole genome shotgun sequence |
| 603 | Limnoraphis robusta CS-951 contig101, whole genome shotgun sequence |
| 604 | Microcystis aeruginosa KW Contig7, whole genome shotgun sequence |
| 605 | Planktothrix sp. PCC 11201 isolate BBR_PRJEB10991 genome assembly, contig: |
| | BBR_D_PL11201_Contig_65, whole genome shotgun sequence |
| 606 | Tolypothrix [Scytonema hofmanni] UTEX 2349 genomic scaffold |
| | Tol9009DRAFT_TPD.5, whole genome shotgun sequence |
| 607 | Oscillatoriales cyanobacterium isolate PH2015_11S_45_847 |
| | PH2015_11S_scaffold_259, whole genome shotgun sequence |
| 608 | Microcoleus chthonoplastes PCC 7420 scf_1103659003829 genomic scaffold, whole |
| | genome shotgun sequence |
| 609 | Thermodesulfitimonas autotrophica strain DSM 102936 Ga0244728_11, whole |
| | genome shotgun sequence |
| 610 | Pleurocapsa sp. CCALA 161 NODE_10_length_78268_cov_10.6832_ID_51584, |
| | whole genome shotgun sequence |
| 611 | Crocosphaera watsonii WH0402 WGS project CAQN00000000 data, contig 01240, |
| | whole genome shotgun sequence |
| 612 | Cyanobacteria bacterium QH_9_48_43 qh_9_scaffold_2265, whole genome shotgun |
| | sequence |
| 613 | Crocosphaera watsonii WH 0401 WGS project CAQM00000000 data, contig 01078, |
| | whole genome shotgun sequence |
| 614 | Richelia sp. SM2_1_7 NODE_5681_length_4369_cov_1.798916, whole genome |
| | shotgun sequence |
| 615 | uncultured cyanobacterium isolate B12_bin-0982 genome assembly, contig: bin- |
| | 0982: 106/268, whole genome shotgun sequence |
| 616 | Geitlerinema sp. PCC 9228 Ga0115370_1196, whole genome shotgun sequence |
| 617 | Ga0315284_10104187 |
| 618 | Moorea sp. SIO1G6 1G6_NODE_1, whole genome shotgun sequence |
| 619 | Moorea sp. SIO3E2 3E2_NODE_539, whole genome shotgun sequence |
| 620 | Richelia sp. SM2_1_7 NODE_5681_length_4369_cov_1.798916, whole genome |
| | shotgun sequence |
| 621 | Planktothrix sp. PCC 11201 isolate BBR_PRJEB10991 genome assembly, scaffold: |
| | BBR_D_PL11201_scaffold28, whole genome shotgun sequence |
| 622 | Lyngbya majuscula 3L genomic scaffold scf52036, whole genome shotgun sequence |
| 623 | Chloroflexi bacterium isolate CFX10 c_000000000001, whole genome shotgun |
| | sequence |
| 624 | Microcystis aeruginosa PCC 9808 genomic scaffold, AAI_G_2201_scaffold9, whole |
| | genome shotgun sequence |
| 625 | Synechococcus sp. PCC 7335 scf_1103496006892 genomic scaffold, whole genome |
| | shotgun sequence |
| 626 | Microcystis aeruginosa NIES-4264 DNA, contig_1, whole genome shotgun sequence |
| 627 | Spirulina subsalsa PCC 9445 Contig210_C1, whole genome shotgun sequence |
| 628 | Candidatus Poribacteria bacterium isolate SB0662_bin_49 |
| | NODE_165_length_109673_cov_85.601252, whole genome shotgun sequence |
| 629 | Candidatus Poribacteria bacterium isolate PCPOR4 Ga0207198_1173, whole |
| | genome shotgun sequence |
| 630 | Candidatus Poribacteria bacterium isolate PCPOR2b Ga0206366_127, whole |
| | genome shotgun sequence |
| 631 | Anabaena sp. AL09 isolate 39864, whole genome shotgun sequence |
| 632 | Chloroflexi bacterium 13_1_20CM_54_36 13_1_20cm_full_scaffold_849, whole |
| | genome shotgun sequence |
| 633 | Coleofasciculus chthonoplastes PCC 7420 ctg_1103659003710, whole genome |
| | shotgun sequence |
| 634 | Planktothrix prolifica NIVA-CYA 540 contig00076, whole genome shotgun |
| | sequence |
| 635 | Nostoc sp. PCC 7120 sequence036, whole genome shotgun sequence |
| 636 | Ga0373625_0200948 |
| 637 | Oscillatoriales cyanobacterium isolate PH2015_08U_46_180 |
| | PH2015_08U_scaffold 548, whole genome shotgun sequence |
| 638 | Acaryochloris sp. CCMEE 5410 contig00452, whole genome shotgun sequence |
| 639 | Ga0315294_10001984 |
| 640 | Microcoleus chthonoplastes PCC 7420 scf_1103659003820 genomic scaffold, whole |
| | genome shotgun sequence |
| 641 | Chloroflexaceae bacterium isolate SM1_1_0 |
| | NODE_2191_length_12172_cov_8.956496, whole genome shotgun sequence |
| 642 | Calditerricola satsumensis JCM 14719 DNA, sequence008, whole genome shotgun |
| | sequence |
| 643 | Fischerella sp. PCC 9605 FIS9605DRAFT_scaffold12.12_C, whole genome shotgun |
| | sequence |
| 644 | Nostoc sp. PCC 7120 plasmid pCC7120alpha DNA, complete genome |
| 645 | Calothrix desertica PCC 7102 sequence007, whole genome shotgun sequence |
| 646 | Candidatus Poribacteria bacterium isolate PCPOR1 Ga0206387_1074, whole |
| | genome shotgun sequence |
| 647 | Coleofasciculus chthonoplastes PCC 7420 ctg_1103659003737, whole genome |
| | shotgun sequence |
| 648 | Moorea sp. SIO3G5 3G5_NODE_1005, whole genome shotgun sequence |
| 649 | Candidatus Poribacteria bacterium isolate SB0662_bin_35 |
| | NODE_11069_length_4700_cov_42.477287, whole genome shotgun sequence |
| 650 | Planktothrix agardhii NIVA-CYA 56/3 genomic scaffold scaffold00008, whole |
| | genome shotgun sequence |
| 651 | Microcoleus chthonoplastes PCC 7420 scf_1103659003831 genomic scaffold, whole |
| | genome shotgun sequence |
| 652 | Nostoc sp. ATCC 53789 plasmid pNsp_b, complete sequence |
| 653 | Scytonema sp. UIC 10036 c00161_NODE_16 . . . , whole genome shotgun sequence |
| 654 | Candidatus Poribacteria bacterium isolate PCPOR4 Ga0207198_1210, whole |
| | genome shotgun sequence |
| 655 | Ga0373629_0012366 |
| 656 | Ga0315275_10046509 |
| 657 | Richelia sp. CSU_2_1 NODE_124_length_49110_cov_7.99549, whole genome |
| | shotgun sequence |
| 658 | Leptolyngbya boryana PCC 6306 genomic scaffold LepboDRAFT_LPC.2, whole |
| | genome shotgun sequence |
| 659 | Anabaena sp. AL93 isolate WA93 101, whole genome shotgun sequence |
| 660 | Microcoleus sp. FACHB-DQ6 contig136, whole genome shotgun sequence |
| 661 | Microcoleus chthonoplastes PCC 7420 scf_1103659003817 genomic scaffold, whole |
| | genome shotgun sequence |
| 662 | Scytonema sp. UIC 10036 c00181_NODE_18 . . . , whole genome shotgun sequence |
| 663 | Ga0373630_0033251 |
| 664 | Microcoleus sp. SU_5_3 NODE_1012_length_11577_cov_3.501223, whole genome |
| | shotgun sequence |
| 665 | TPA_asm: Methanomicrobia archaeon isolate HyVt-11 Ga0116201_100544, whole |
| | genome shotgun sequence |
| 666 | [Scytonema hofmanni] UTEX 2349 Tol9009DRAFT_TPD.8_C61, whole genome |
| | shotgun sequence |
| 667 | Oscillatoriales cyanobacterium isolate PH2015_08U_46_180 |
| | PH2015_08U_scaffold_312, whole genome shotgun sequence |
| 668 | Moorea sp. SIO3C2 3C2_NODE_58, whole genome shotgun sequence |
| 669 | Bacterium isolate NIOZ-UU8 NIOZ-UU_NODE_2519_length_23800_cov_8.3314, |
| | whole genome shotgun sequence |
| 670 | Microcystis aeruginosa PCC 9717 genomic scaffold, AAI_B_2196_scaffold3, whole |
| | genome shotgun sequence |
| 671 | Candidatus Poribacteria bacterium bin44 |
| | NODE_3295_length_21674_cov_18.9376_ID_6589, whole genome shotgun |
| | sequence |
| 672 | Calothrix sp. NIES-4105 plasmid plasmid1 DNA, complete genome |
| 673 | Mastigocladus laminosus UU774 scaffold_14, whole genome shotgun sequence |
| 674 | Ga0373630_0000125 |
| 675 | Crocosphaera watsonii WH 8501 ctg230, whole genome shotgun sequence |
| 676 | Lyngbya sp. PCC 8106 1099428180525, whole genome shotgun sequence |
| 677 | Cyanobacteria bacterium RU_5_0 NODE_647_length_26982_cov_14.272575, |
| | whole genome shotgun sequence |
| 678 | Oscillatoriales cyanobacterium isolate PH2015_12U_45_315 |
| | PH2015_12U_scaffold_146, whole genome shotgun sequence |
| 679 | bioreactor sludge metagenome genome assembly, contig: |
| | NODE_312_length_7818_cov_3.276826, whole genome shotgun sequence |
| 680 | Merismopedia sp. SIO2A8 2A8_NODE_240, whole genome shotgun sequence |
| 681 | Microcystis aeruginosa NIES-2520 DNA, contig_62, whole genome shotgun |
| | sequence |
| 682 | Ga0315284_10054593 |
| 683 | Trichocoleus sp. FACHB-40 contig64, whole genome shotgun sequence |
| 684 | Brasilonema bromeliae SPC951 NODE_3533_length_9450_cov_4.016285, whole |
| | genome shotgun sequence |
| 685 | Cyanobacteria bacterium QS_8_48_54 qs_8_scaffold_4292, whole genome shotgun |
| | sequence |
| 686 | Merismopedia glauca CCAP 1448/3 |
| | NODE_172_length_31568_cov_6.44124_ID_38037, whole genome shotgun |
| | sequence |
| 687 | Mastigocladus laminosus UU774 strain 74 scaffold_4, whole genome shotgun |
| | sequence |
| 688 | uncultured Microcoleus sp. isolate AVDCRST_MAG84 genome assembly, contig: |
| | NODE360, whole genome shotgun sequence |
| 689 | Lyngbya majuscula 3L genomic scaffold scf49145, whole genome shotgun sequence |
| 690 | Microcystis aeruginosa BLCCF158 A6_contig_72, whole genome shotgun sequence |
| 691 | Oscillatoriales cyanobacterium isolate PH2015_01D_46_31 |
| | PH2015_01D_scaffold_1233, whole genome shotgun sequence |
| 692 | Ktedonobacter sp. 13_2_20CM_2_56_8 13_2_20cm_2_scaffold_552, whole genome |
| | shotgun sequence |
| 693 | Microcystis aeruginosa Ma_MB_S_20031200_S102 S102_57, whole genome |
| | shotgun sequence |
| 694 | Symploca sp. SIO2B6 2B6_NODE_6, whole genome shotgun sequence |
| 695 | Microcystis panniformis Mp_MB_F_20080800_S26 S26_24, whole genome shotgun |
| | sequence |
| 696 | Microcystis aeruginosa NIES-87 DNA, sequence016, whole genome shotgun |
| | sequence |
| 697 | Moorea sp. SIO4A3 4A3_NODE_299, whole genome shotgun sequence |
| 698 | Tolypothrix sp. T3-bin4 k141_222205_length_2371_cov_6.0000, whole genome |
| | shotgun sequence |
| 699 | Planktothrix prolifica NIVA-CYA 98 contig00182, whole genome shotgun sequence |
| 700 | Oscillatoriales cyanobacterium isolate PH2015_07D_46_1245 |
| | PH2015_07D_scaffold_1653, whole genome shotgun sequence |
| 701 | Microcoleus sp. FACHB-61 contig80, whole genome shotgun sequence |
| 702 | Candidatus Poribacteria bacterium isolate SB0675_bin_22 |
| | NODE_226_length_59321_cov_11.232410, whole genome shotgun sequence |
| 703 | Oscillatoriales cyanobacterium isolate PH2015_07D_46_1245 |
| | PH2015 07D_scaffold_1598, whole genome shotgun sequence |
| 704 | Planktothrix rubescens strain PCC 7821 genome assembly, contig: |
| | AAI_N_PLAN_Contig_12, whole genome shotgun sequence |
| 705 | Crocosphaera watsonii WH 0005 WGS project CAQL00000000 data, contig 00096, |
| | whole genome shotgun sequence |
| 706 | Fischerella sp. isolate L.E.CL.63 k119_1170006, whole genome shotgun sequence |
| 707 | Ga0315279_10074524 |
| 708 | Crocosphaera watsonii WH 8501 ctg230, whole genome shotgun sequence |
| 709 | Cyanobacteria bacterium QS_5_48_63 qs_5_scaffold_1134, whole genome shotgun |
| | sequence |
| 710 | Gloeocapsa sp. PCC 73106 scaffold_00137, whole genome shotgun sequence |
| 711 | Chloroflexi bacterium isolate CF_156 14_0903_12_20cm_scaffold_15515, whole |
| | genome shotgun sequence |
| 712 | Dolichospermum sp. UHCC 0259 scaffold237_cov0, whole genome shotgun |
| | sequence |
| 713 | Limnoraphis robusta CS-951 contig101, whole genome shotgun sequence |
| 714 | Nostoc sp. ATCC 53789 scaffold90.1, whole genome shotgun sequence |
| 715 | Scytonema sp. NIES-4073 plasmid plasmid4 DNA, complete genome |
| 716 | marine sediment metagenome genome assembly, contig: |
| | NODE_472_length_12067_cov_23.972361, whole genome shotgun sequence |
| 717 | Microcystis panniformis Mp_GB_SS_20050300_S99D S99D_290, whole genome |
| | shotgun sequence |
| 718 | Leptolyngbya sp. FACHB-161 contig17, whole genome shotgun sequence |
| 719 | Mastigocladus laminosus UU774 scaffold_2, whole genome shotgun sequence |
| 720 | Microcoleus chthonoplastes PCC 7420 scf_1103659003824 genomic scaffold, whole |
| | genome shotgun sequence |
| 721 | Marine metagenome k99_9634682, whole genome shotgun sequence |
| 722 | Cyanobacteria bacterium isolate GSL.Bin1 |
| | NODE_11831_length_5427_cov_5.19506, whole genome shotgun sequence |
| 723 | Ga0373629_0000913 |
| 724 | Symploca sp. SIO2E6 2E6_NODE_166, whole genome shotgun sequence |
| 725 | Arthrospira maxima CS-328 ctg6, whole genome shotgun sequence |
| 726 | Coleofasciculus chthonoplastes PCC 7420 ctg_1103659003716, whole genome |
| | shotgun sequence |
| 727 | Moorea sp. SIO4G3 4G3_NODE_88, whole genome shotgun sequence |
| 728 | Microcoleus sp. SM1_3_4 NODE_9942_length_4243_cov_2.146987, whole genome |
| | shotgun sequence |
| 729 | Calothrix elsteri CCALA 953 scaffold1, whole genome shotgun sequence |
| 730 | Scytonema millei VB511283 scaffold_83, whole genome shotgun sequence |
| 731 | Ga0373628_0125242 |
| 732 | uncultured cyanobacterium isolate I3b_bin-053 genome assembly, contig: bin- |
| | 053: 0899/1000, whole genome shotgun sequence |
| 733 | Ga0373628_0023257 |
| 734 | Tychonema bourrellyi FEM_GT703 scaffold98_size18864, whole genome shotgun |
| | sequence |
| 735 | cyanobacterium TDX16 genomic scaffold Scaffold113, whole genome shotgun |
| | sequence |
| 736 | Oscillatoriales cyanobacterium isolate PH2015_06S_46_2585 |
| | PH2015_06S_scaffold_5205, whole genome shotgun sequence |
| 737 | Microcoleus sp. Co-bin12 k141_18383957_length_3551_cov_15.0000, whole |
| | genome shotgun sequence |
| 738 | Ga0373625_0150781 |
| 739 | Microcystis aeruginosa NIES-2522 DNA, contig_16, whole genome shotgun |
| | sequence |
| 740 | Merismopedia sp. SIO2A8 2A8_NODE_178, whole genome shotgun sequence |
| 741 | Thermodesulfitimonas autotrophica strain DSM 102936 Ga0244728_11, whole |
| | genome shotgun sequence |
| 742 | Planktothrix agardhii NIVA-CYA 34 contig00003, whole genome shotgun sequence |
| 743 | Scytonema hofmannii FACHB-248 contig65, whole genome shotgun sequence |
| 744 | Microcystis aeruginosa NIES-2522 DNA, contig_11, whole genome shotgun |
| | sequence |
| 745 | Ga0373625_0019996 |
| 746 | uncultured cyanobacterium isolate A5_bin-0177 genome assembly, contig: bin- |
| | 0177: 194/358, whole genome shotgun sequence |
| 747 | Candidatus Poribacteria bacterium isolate Plut_88891 |
| | unfiltered_Plut_88891_genomic_contig_791289, whole genome shotgun sequence |
| 748 | Okeania sp. KiyG1 DNA, sequence087, whole genome shotgun sequence |
| 749 | Sponge metagenome NODE_682_length_63463_cov_19.1244_ID_1363, whole |
| | genome shotgun sequence |
| 750 | Candidatus Poribacteria bacterium bin44 |
| | NODE_10808_length_4286_cov_13.0202_ID_21615, whole genome shotgun |
| | sequence |
| 751 | Oscillatoriales cyanobacterium isolate PH2015_08U_46_180 |
| | PH2015_08U_scaffold_525, whole genome shotgun sequence |
| 752 | Anabaena variabilis FACHB-164 contig6, whole genome shotgun sequence |
| 753 | Sponge metagenome NODE_8534_length_9264_cov_3.88257_ID_17067, whole |
| | genome shotgun sequence |
| 754 | Coleofasciculus chthonoplastes PCC 7420 ctg_1103659003657, whole genome |
| | shotgun sequence |
| 755 | Planktothrix sp. FACHB-1355 contig815, whole genome shotgun sequence |
| 756 | Coleofasciculus chthonoplastes PCC 7420 ctg_1103659003710, whole genome |
| | shotgun sequence |
| 757 | Candidatus Poribacteria bacterium isolate SB0678_bin_11 |
| | NODE_981_length_15456_cov_6.404649, whole genome shotgun sequence |
| 758 | Scytonema sp. HK-05 NIES-2130_Scaffold_4, whole genome shotgun sequence |
| 759 | Microcystis aeruginosa K13-06 Ga0188025_103771, whole genome shotgun |
| | sequence |
| 760 | Nostoc sp. 106C 19_117334_26.4148_51_117334_0.395332981062608, whole |
| | genome shotgun sequence |
| 761 | Oscillatoriales cyanobacterium RU_3_3 NODE_12232_length_4241_cov_2.991979, |
| | whole genome shotgun sequence |
| 762 | Microcoleus sp. bin48.metabat.b7b8b9.023 WN_Microcoleus_1_scaffold_74, whole |
| | genome shotgun sequence |
| 763 | Ga0315279_10000292 |
| 764 | Crocosphaera watsonii WH 8502 WGS project CAQK00000000 data, contig 00461, |
| | whole genome shotgun sequence |
| 765 | Sponge metagenome NODE_20809_length_4413_cov_12.934_ID_41617, whole |
| | genome shotgun sequence |
| 766 | Candidatus Poribacteria bacterium isolate SB0678_bin_11 |
| | NODE_2683_length_8095_cov_7.303607, whole genome shotgun sequence |
| 767 | Mastigocladus laminosus UU774 scaffold_40, whole genome shotgun sequence |
| 768 | Dolichospermum sp. UHCC 0406 scaffold7_cov325, whole genome shotgun |
| | sequence |
| 769 | fermentation metagenome genome assembly, contig: |
| | NODE_6575_length_8110_cov_4.774426, whole genome shotgun sequence |
| 770 | Moorea sp. SIO3F7 3F7_NODE_36, whole genome shotgun sequence |
| 771 | Ga0373628_0056463 |
| 772 | Candidatus Poribacteria bacterium isolate SB0662_bin_35 |
| | NODE_2684_length_18948_cov_37.344890, whole genome shotgun sequence |
| 773 | [Scytonema hofmanni] UTEX 2349 Tol9009DRAFT_TPD.5_C3, whole genome |
| | shotgun sequence |
| 774 | Microcystis aeruginosa NIES-4264 DNA, contig_1, whole genome shotgun sequence |
| 775 | Candidatus Methanoculleus thermohydrogenotrophicum isolate DTU006 |
| | scaffold603, whole genome shotgun sequence |
| 776 | Candidatus Poribacteria bacterium isolate PCPOR2 Ga0207196_171, whole genome |
| | shotgun sequence |
| 777 | Oscillatoriales cyanobacterium isolate PH2015_01U_44_212 |
| | PH2015 01U_scaffold_598, whole genome shotgun sequence |
| 778 | Ga0255812_10666830 |
| 779 | Oscillatoriales cyanobacterium isolate PH2015_04D_45_965 |
| | PH2015_04D_scaffold_577, whole genome shotgun sequence |
| 780 | Candidatus Poribacteria bacterium isolate SB0669_bin_10 |
| | NODE_735_length_15227_cov_8.792381, whole genome shotgun sequence |
| 781 | viral metagenome genome assembly, contig: k249_576930, whole genome shotgun |
| | sequence |
| 782 | Okeania sp. SIO2D1 2D1_NODE_2565, whole genome shotgun sequence |
| 783 | Ga0373629_0010383 |
| 784 | TPA_asm: Synechococcus sp. isolate SpSt-164 Ga0101943_1001739, whole genome |
| | shotgun sequence |
| 785 | Candidatus Poribacteria bacterium isolate PCPOR1 Ga0206387_1065, whole |
| | genome shotgun sequence |
| 786 | Moorea sp. SIO3A5 3A5_NODE_1, whole genome shotgun sequence |
| 787 | Candidatus Poribacteria bacterium isolate SB0661_bin_50 |
| | NODE_4170_length_10283_cov_10.155749, whole genome shotgun sequence |
| 788 | Crocosphaera watsonii WH 8502 WGS project CAQK00000000 data, contig 00002, |
| | whole genome shotgun sequence |
| 789 | Microcystis aeruginosa NIES-2522 DNA, contig_18, whole genome shotgun |
| | sequence |
| 790 | Candidatus Poribacteria bacterium isolate PCPOR1 Ga0206387_1076, whole |
| | genome shotgun sequence |
| 791 | metagenomes genome assembly, contig: NODE_4567_length_4333_cov_2.149369, |
| | whole genome shotgun sequence |
| 792 | Dolichospermum sp. UHCC 0259 scaffold275_cov0, whole genome shotgun |
| | sequence |
| 793 | Cyanobacteria bacterium SW_8_48_13 sw_8_scaffold_613, whole genome shotgun |
| | sequence |
| 794 | Moorea sp. SIO3I8 3I8_NODE_130, whole genome shotgun sequence |
| 795 | Cyanobacteria bacterium QH_1_48_107 qh_1_scaffold_1498, whole genome |
| | shotgun sequence |
| 796 | Mastigocladopsis repens PCC 10914 Mas10914DRAFT_scaffold1.1_C11, whole |
| | genome shotgun sequence |
| 797 | Microcystis aeruginosa PCC 9717 genomic scaffold, AAI_B_2196_scaffold107, |
| | whole genome shotgun sequence |
| 798 | Microcystis aeruginosa BS13-02 Ga0188020_100328, whole genome shotgun |
| | sequence |
| 799 | Moorea sp. SIO3I8 3I8_NODE_43, whole genome shotgun sequence |
| 800 | Calothrix sp. PCC 7103 Cal7103DRAFT_CPM.1_C5, whole genome shotgun |
| | sequence |
| 801 | Ga0315284_10005110 |
| 802 | Kouleothrix aurantiaca strain COM-B contig_153, whole genome shotgun sequence |
| 803 | Oscillatoriales cyanobacterium isolate PH2015_03D_45 235 |
| | PH2015_03D_scaffold_234, whole genome shotgun sequence |
| 804 | Moorea sp. SIO2B7 2B7_NODE_1581, whole genome shotgun sequence |
| 805 | Nostoc linckia FACHB-104 contig34, whole genome shotgun sequence |
| 806 | Okeania sp. SIO3I5 3I5_NODE_203, whole genome shotgun sequence |
| 807 | TPA_asm: Pricia sp. isolate HyVt-320 HyVt-320_k145_146519, whole genome |
| | shotgun sequence |
| 808 | Oscillatoriales cyanobacterium isolate PH2015_04U_45_1042 |
| | PH2015_04U_scaffold_439, whole genome shotgun sequence |
| 809 | Ga0315280_10014910 |
| 810 | Microcoleus chthonoplastes PCC 7420 scf_1103659003820 genomic scaffold, whole |
| | genome shotgun sequence |
| 811 | Oscillatoriales cyanobacterium isolate PH2015_06S_46_2585 |
| | PH2015_06S_scaffold_8789, whole genome shotgun sequence |
| 812 | Ga0315280_10062518 |
| 813 | Ga0315277_10071052 |
| 814 | Microcystis aeruginosa W11-03 Ga0187975_10118, whole genome shotgun |
| | sequence |
| 815 | Lyngbya majuscula 3L genomic scaffold scf52117, whole genome shotgun sequence |
| 816 | Microcystis aeruginosa BLCCF158 A6_contig_33, whole genome shotgun sequence |
| 817 | Candidatus Gracilibacteria bacterium isolate SU_1_2 |
| | NODE_5_length_107249_cov_3.991104, whole genome shotgun sequence |
| 818 | Chlorogloeopsis fritschii PCC 6912 sequence18, whole genome shotgun sequence |
| 819 | Anabaena minutissima FACHB-250 contig50, whole genome shotgun sequence |
| 820 | Ga0373625_0208636 |
| 821 | Bacterium isolate NIOZ-UU8 NIOZ-UU_NODE_2597_length_23367_cov_8.29328, |
| | whole genome shotgun sequence |
| 822 | Candidatus Poribacteria bacterium bin44 |
| | NODE_3467_length_20673_cov_18.9015_ID_6933, whole genome shotgun |
| | sequence |
| 823 | Ga0373625_0000556 |
| 824 | Candidatus Poribacteria bacterium isolate SB0663_bin_6 |
| | NODE_1215_length_9091_cov_6.427291, whole genome shotgun sequence |
| 825 | sediment metagenome genome assembly, contig: |
| | NODE_4_length_48544_cov_10.095073, whole genome shotgun sequence |
| 826 | Coleofasciculus sp. Co-bin14 k141_2600778_length_3864_cov_6.9162, whole |
| | genome shotgun sequence |
| 827 | Microcoleus chthonoplastes PCC 7420 scf_1103659003781 genomic scaffold, whole |
| | genome shotgun sequence |
| 828 | Candidatus Poribacteria bacterium isolate SB0669_bin_10 |
| | NODE_506_length_18523_cov_9.568984, whole genome shotgun sequence |
| 829 | Oscillatoriales cyanobacterium isolate PH2015_12D_45_607 |
| | PH2015_12D_scaffold_284, whole genome shotgun sequence |
| 830 | Ga0315280_10062386 |
| 831 | wastewater metagenome genome assembly, contig: |
| | NODE_3775_length_6277_cov_3.468660, whole genome shotgun sequence |
| 832 | Cyanobacteria bacterium SW_10_48_33 sw_10_scaffold_2122, whole genome |
| | shotgun sequence |
| 833 | Sponge metagenome NODE_8241_length_9536_cov_20.0624_ID_16481, whole |
| | genome shotgun sequence |
| 834 | Brasilonema bromeliae SPC951 NODE_2367_length_14264_cov_4.685270, whole |
| | genome shotgun sequence |
| 835 | Oscillatoriales cyanobacterium isolate PH2015_10S_46_199 |
| | PH2015_10S_scaffold_127, whole genome shotgun sequence |
| 836 | Microcystis aeruginosa NIES-2522 DNA, contig_11, whole genome shotgun |
| | sequence |
| 837 | TPA_asm: Cyanobacteria bacterium UBA6047 UBA6047_contig_14, whole genome |
| | shotgun sequence |
| 838 | Ga0315294_10110587 |
| 839 | Okeania sp. SIO2D1 2D1_NODE_2565, whole genome shotgun sequence |
| 840 | Coleofasciculus chthonoplastes PCC 7420 ctg_1103659003737, whole genome |
| | shotgun sequence |
| 841 | Ga0315280_10000556 |
| 842 | Ga0373625_0069134 |
| 843 | Scytonema sp. HK-05 NIES-2130_Scaffold_7, whole genome shotgun sequence |
| 844 | Synechococcus sp. PCC 7335 scf_1103496006892 genomic scaffold, whole genome |
| | shotgun sequence |
| 845 | wastewater metagenome genome assembly, contig: |
| | NODE_103_length_54413_cov_6.362927, whole genome shotgun sequence |
| 846 | Microcystis sp. M_QC_C_20170808_M2Col M2Col_9, whole genome shotgun |
| | sequence |
| 847 | coral metagenome genome assembly, contig: |
| | NODE_19_length_33842_cov_7.533985, whole genome shotgun sequence |
| 848 | bioreactor sludge metagenome genome assembly, contig: |
| | NODE_10_length_82959_cov_115.220074, whole genome shotgun sequence |
| 849 | Chloroflexi bacterium isolate CF_154 14_0903_05_20cm_scaffold_1223, whole |
| | genome shotgun sequence |
| 850 | activated sludge metagenome genome assembly, contig: |
| | NODE_2679_length_5473_cov_4.070321, whole genome shotgun sequence |
| 851 | Moorea sp. SIO3C2 3C2_NODE_211, whole genome shotgun sequence |
| 852 | Microcystis wesenbergii Mw_QC_B_20070930_S4D S4D_39, whole genome |
| | shotgun sequence |
| 853 | Microcoleus chthonoplastes PCC 7420 scf_1103659003812 genomic scaffold, whole |
| | genome shotgun sequence |
| 854 | Coleofasciculus chthonoplastes PCC 7420 ctg_1103659003726, whole genome |
| | shotgun sequence |
| 855 | Oscillatoriales cyanobacterium isolate PH2015_03U_45_708 |
| | PH2015_03U_scaffold_1089, whole genome shotgun sequence |
| 856 | Spirulina subsalsa PCC 9445 Contig203_C, whole genome shotgun sequence |
| 857 | Oscillatoriales cyanobacterium isolate PH2015_02U_45_393 |
| | PH2015_02U_scaffold_88, whole genome shotgun sequence |
| 858 | Nostoc sp. FACHB-110 contig25, whole genome shotgun sequence |
| 859 | Ga0315273_10010493 |
| 860 | Ga0315279_10000059 |
| 861 | Microcoleus chthonoplastes PCC 7420 scf_1103659003831 genomic scaffold, whole |
| | genome shotgun sequence |
| 862 | Ga0315277_10058131 |
| 863 | Cyanobacteria bacterium SW_12_48_29 sw_12_scaffold_1078, whole genome |
| | shotgun sequence |
| 864 | Dolichospermum sp. UHCC 0259 scaffold275_cov0, whole genome shotgun |
| | sequence |
| 865 | Ga0373630_0041537 |
| 866 | Scytonema sp. HK-05 NIES-2130_Scaffold_6, whole genome shotgun sequence |
| 867 | Microcystis aeruginosa NIES-88 scaffold5, whole genome shotgun sequence |
| 868 | Ammonifex sp. isolate SURF_55 Ga0104751_1001767, whole genome shotgun |
| | sequence |
| 869 | Microcystis aeruginosa NIES-44 DNA, contig: contig1_21, strain: NIES-44, whole |
| | genome shotgun sequence |
| 870 | Oscillatoriales cyanobacterium RU_3_3 NODE_12232_length_4241_cov_2.991979, |
| | whole genome shotgun sequence |
| 871 | Scytonema sp. CRU_2_7 NODE_6006_length_4918_cov_2.50845, whole genome |
| | shotgun sequence |
| 872 | Okeania sp. SIO2D1 2D1_NODE_961, whole genome shotgun sequence |
| 873 | TPA_asm: Cyanobacteria bacterium UBA11372 contig_7805, whole genome |
| | shotgun sequence |
| 874 | Peptococcaceae bacterium isolate palsa_1188 73.20120500_P19.26_contig_2246, |
| | whole genome shotgun sequence |
| 875 | Candidatus Poribacteria bacterium isolate SB0675_bin_22 |
| | NODE_1437_length_17721_cov_14.118023, whole genome shotgun sequence |
| 876 | Cyanobacteria bacterium isolate GSL.Bin1 |
| | NODE_2522_length_16363_cov_5.19154, whole genome shotgun sequence |
| 877 | Calothrix sp. NIES-4071 plasmid plasmid1 DNA, complete genome |
| 878 | Calothrix elsteri CCALA 953 scaffold1, whole genome shotgun sequence |
| 879 | Microcoleus sp. Co-bin12 k141_18383957_length_3551_cov_15.0000, whole |
| | genome shotgun sequence |
| 880 | Microcystis aeruginosa W11-03 Ga0187975_10207, whole genome shotgun |
| | sequence |
| 881 | Sulfobacillus benefaciens isolate AMDSBA4 AMDSBA4_59, whole genome |
| | shotgun sequence |
| 882 | Ga0373629_0002383 |
| 883 | Arthrospira platensis NIES-46 DNA, sequence003, whole genome shotgun sequence |
| 884 | Calothrix sp. NIES-4071 plasmid plasmid2 DNA, complete genome |
| 885 | Acidithiobacillus ferrivorans WGS project CCCS000000000 data, strain CF27, |
| | contig ATN_AFERRI_Contig_8, whole genome shotgun sequence |
| 886 | Scytonema sp. CRU_2_7 NODE_6006_length_4918_cov_2.50845, whole genome |
| | shotgun sequence |
| 887 | Microcoleus sp. Co-bin12 k141_16798132_length_1964_cov_17.0000, whole |
| | genome shotgun sequence |
| 888 | Arthrospira platensis C1 scaffold06, whole genome shotgun sequence |
| 889 | Cyanothece sp. BG0011 unitig_31, whole genome shotgun sequence |
| 890 | Moorea sp. SIO3I7 3I7_NODE_59, whole genome shotgun sequence |
| 891 | TPA_asm: Deltaproteobacteria bacterium isolate UBA8905 contig_81556, whole |
| | genome shotgun sequence |
| 892 | Mastigocoleus testarum BC008 Contig-69, whole genome shotgun sequence |
| 893 | Iningainema sp. BLCCT55 NODE_25_length_141538_cov_25.362927, whole |
| | genome shotgun sequence |
| 894 | Candidatus Poribacteria bacterium isolate SB0661_bin_29 |
| | NODE_49_length_242868_cov_73.526133, whole genome shotgun sequence |
| 895 | Planktothrix agardhii NIVA-CYA 34 contig00087, whole genome shotgun sequence |
| 896 | Planktothrix prolifica NIVA-CYA 406 contig00144, whole genome shotgun |
| | sequence |
| 897 | Chlorogloeopsis fritschii PCC 6912 contig00059, whole genome shotgun sequence |
| 898 | Moorea sp. SIO4A5 4A5_NODE_16, whole genome shotgun sequence |
| 899 | Ga0315296_10000160 |
| 900 | Tolypothrix bouteillei VB521301 scaffold_8, whole genome shotgun sequence |
| 901 | Ga0373625_0000329 |
| 902 | Sponge metagenome NODE_4235_length_17335_cov_18.8799_ID_8469, whole |
| | genome shotgun sequence |
| 903 | Microcystis aeruginosa 9717 WGS project CAII01000000 data, contig |
| | AAI_B_2196_36, whole genome shotgun sequence |
| 904 | Moorea sp. SIO1G6 1G6_NODE_19, whole genome shotgun sequence |
| 905 | Scytonema sp. HK-05 NIES-2130_Scaffold_2, whole genome shotgun sequence |
| 906 | Cyanobacteria bacterium isolate GSL.Bin1 NODE_5738_length_9529_cov_5.21131, |
| | whole genome shotgun sequence |
| 907 | Ga0214071_1336518 |
| 908 | fermentation metagenome genome assembly, contig: |
| | NODE_581_length_39144_cov_26.091611, whole genome shotgun sequence |
| 909 | Ga0373626_0003683 |
| 910 | Ga0315294_10032635 |
| 911 | wastewater metagenome genome assembly, contig: |
| | NODE_6266_length_3913_cov_11.333852, whole genome shotgun sequence |
| 912 | Calothrix sp. NIES-4105 plasmid plasmid2 DNA, complete genome |
| 913 | Scytonema millei VB511283 scaffold_83, whole genome shotgun sequence |
| 914 | Microcystis aeruginosa NaRes975 Scaffold58_1, whole genome shotgun sequence |
| 915 | uncultured Syntrophaceae bacterium isolate AlinenSediments_bin-3900 genome |
| | assembly, contig: bin-3900: 172/742, whole genome shotgun sequence |
| 916 | Symploca sp. SIO1A3 1A3_NODE_235, whole genome shotgun sequence |
| 917 | Tychonema bourrellyi FEM_GT703 scaffold38_size30849, whole genome shotgun |
| | sequence |
| 918 | Dolichospermum sp. UHCC 0406 scaffold7_cov325, whole genome shotgun |
| | sequence |
| 919 | Moorea sp. SIO2C4 2C4_NODE_709, whole genome shotgun sequence |
| 920 | coral metagenome genome assembly, contig: |
| | NODE_200_length_14726_cov_17.158236, whole genome shotgun sequence |
| 921 | Arthrospira sp. PCC 8005, WGS project CAFN00000000 data, strain PCC 8005, |
| | Contig4958-2130, whole genome shotgun sequence |
| 922 | Ga0315296_10033857 |
| 923 | Acaryochloris marina MBIC11017 plasmid pREB2, complete sequence |
| 924 | Geitlerinema sp. PCC 7105 Gei7105DRAFT_GPC.5_C15, whole genome shotgun |
| | sequence |
| 925 | Calothrix parietina FACHB-288 contig3, whole genome shotgun sequence |
| 926 | human metagenome genome assembly, contig: |
| | NODE_749_length_32251_cov_16.9544, whole genome shotgun sequence |
| 927 | Ktedonobacter sp. 13_2_20CM_53_11 13_2_20cm_scaffold_115, whole genome |
| | shotgun sequence |
| 928 | Ga0315285_10087313 |
| 929 | Ga0373630_0000013 |
| 930 | Ga0307928_10006388 |
| 931 | Gloeocapsa sp. PCC 73106 scaffold_00213, whole genome shotgun sequence |
| 932 | Sponge metagenome NODE_14928_length_5778_cov_18.9207_ID_29855, whole |
| | genome shotgun sequence |
| 933 | uncultured cyanobacterium isolate B-1_bin-000 genome assembly, contig: bin- |
| | 000: 246/625, whole genome shotgun sequence |
| 934 | Moorea sp. SIO4E2 4E2_NODE_856, whole genome shotgun sequence |
| 935 | Moorea sp. SIO4G3 4G3_NODE_35, whole genome shotgun sequence |
| 936 | Moorea sp. SIO4A3 4A3_NODE_562, whole genome shotgun sequence |
| 937 | Scytonema sp. UIC 10036 c00074_NODE_74 . . . , whole genome shotgun sequence |
| 938 | Microcystis aeruginosa 9809 WGS project CAIO01000000 data, contig |
| | AAI_H_2202_430, whole genome shotgun sequence |
| 939 | Mastigocladus laminosus UU774 scaffold_2, whole genome shotgun sequence |
| 940 | Brasilonema sp. UFV-L1 scaffold102_cov13, whole genome shotgun sequence |
| 941 | Ga0315284_10111608 |
| 942 | Scytonema sp. HK-05 NIES-2130_Scaffold_97, whole genome shotgun sequence |
| 943 | Microcystis aeruginosa Ma_MB_S_20031200_S102D S102D_79, whole genome |
| | shotgun sequence |
| 944 | Stanieria cyanosphaera PCC 7437 plasmid pSTA7437.01, complete sequence |
| 945 | Aphanizomenon flos-aquae NIES-81 contig00159, whole genome shotgun sequence |
| 946 | Ga0315280_10064331 |
| 947 | Microcystis aeruginosa KW Contig7, whole genome shotgun sequence |
| 948 | Ga0315277_10008377 |
| 949 | Microcystis aeruginosa NIES-4264 DNA, contig_35, whole genome shotgun |
| | sequence |
| 950 | Okeania sp. SIO2D1 2D1_NODE_571, whole genome shotgun sequence |
| 951 | Ardenticatenales bacterium isolate MGR_bin47 SD2897-2912_k127_4773552, |
| | whole genome shotgun sequence |
| 952 | Clostridia bacterium isolate MAG-71 Moorellales_O3_bin30_Scaffold_52, whole |
| | genome shotgun sequence |
| 953 | Symploca sp. SIO2B6 2B6_NODE_34, whole genome shotgun sequence |
| 954 | Chamaesiphon polymorphus CCALA 037 |
| | NODE_187_length_14934_cov_6.09504_ID_66389, whole genome shotgun |
| | sequence |
| 955 | Scytonema sp. HK-05 NIES-2130_Scaffold_43, whole genome shotgun sequence |
| 956 | cyanobacterium TDX16 genomic scaffold Scaffold113, whole genome shotgun |
| | sequence |
| 957 | Moorea sp. SIO1F2 1F2_NODE_259, whole genome shotgun sequence |
| 958 | Candidatus Poribacteria bacterium isolate PCPOR4 Ga0207198_1002, whole |
| | genome shotgun sequence |
| 959 | Microcystis aeruginosa PCC 7941 genomic scaffold, AAI_D_2198_scaffold21, |
| | whole genome shotgun sequence |
| 960 | Planktothrix sp. FACHB-1375 contig194, whole genome shotgun sequence |
| 961 | Anaerobic digester metagenome 7356, whole genome shotgun sequence |
| 962 | Ga0315273_10032131 |
| 963 | Microcoleus sp. FACHB-53 contig6, whole genome shotgun sequence |
| 964 | Leptolyngbya foveolarum isolate ULC129bin1 scaffold6_size63472, whole genome |
| | shotgun sequence |
| 965 | uncultured Bacteroidetes bacterium isolate Umea3p4_bin-0112 genome assembly, |
| | contig: bin-0112: 053/751, whole genome shotgun sequence |
| 966 | Tychonema bourrellyi FEM_GT703 scaffold165_size8795, whole genome shotgun |
| | sequence |
| 967 | Dolichospermum sp. UHCC 0352 scaffold173_cov0, whole genome shotgun |
| | sequence |
| 968 | Ga0373625_0055246 |
| 969 | Planktothrix sp. FACHB-1375 contig120, whole genome shotgun sequence |
| 970 | Synechococcales cyanobacterium RM1_1_8 |
| | NODE_585_length_24958_cov_3.770368, whole genome shotgun sequence |
| 971 | Nitrosococcus oceani strain AFC132 contig_24, whole genome shotgun sequence |
| 972 | Ga0373626_0020143 |
| 973 | Microcystis aeruginosa F13-15 Ga0187998_10353, whole genome shotgun sequence |
| 974 | Candidatus Poribacteria bacterium isolate DGPOR9 scf7180000027709, whole |
| | genome shotgun sequence |
| 975 | Oscillatoriales cyanobacterium isolate PH2015_06S_46_2585 |
| | PH2015_06S_scaffold_6494, whole genome shotgun sequence |
| 976 | Moorea sp. SIO2I5_2I5_NODE_1458, whole genome shotgun sequence |
| 977 | Mastigocladus laminosus UU774 scaffold_3, whole genome shotgun sequence |
| 978 | Coleofasciculus chthonoplastes PCC 7420 ctg_1103659003736, whole genome |
| | shotgun sequence |
| 979 | TPA_asm: Richelia sp. UBA3958 UBA3958_contig_1375, whole genome shotgun |
| | sequence |
| 980 | Chroococcidiopsis sp. FACHB-1243 contig9, whole genome shotgun sequence |
| 981 | Burkholderiaceae bacterium isolate Bin_15_2 c_000000009312, whole genome |
| | shotgun sequence |
| 982 | Trichocoleus sp. FACHB-6 contig76, whole genome shotgun sequence |
| 983 | Scytonema sp. HK-05 NIES-2130_Scaffold 36, whole genome shotgun sequence |
| 984 | Crocosphaera watsonii WH0402 WGS project CAQN00000000 data, contig 01240, |
| | whole genome shotgun sequence |
| 985 | TPA_asm: Richelia sp. UBA3308 UBA3308_contig_795, whole genome shotgun |
| | sequence |
| 986 | Ga0315280_10060196 |
| 987 | Microcystis flos-aquae Mf_QC_C_20070823_S10D S10D_65, whole genome |
| | shotgun sequence |
| 988 | Pleurocapsa sp. CCALA 161 NODE_15_length_65967_cov_11.0301_ID_47581, |
| | whole genome shotgun sequence |
| 989 | Ga0373625_0205637 |
| 990 | Ga0315285_10000720 |
| 991 | Ga0315284_10006726 |
| 992 | Moorea sp. SIO4G2 4G2_NODE_2420, whole genome shotgun sequence |
| 993 | Chloroflexia bacterium isolate INTA.AUR.084 contig-100_52925, whole genome |
| | shotgun sequence |
| 994 | Planktothrix mougeotii NIVA-CYA 405 contig00063, whole genome shotgun |
| | sequence |
| 995 | Symploca sp. SIO2B6 2B6_NODE_6, whole genome shotgun sequence |
| 996 | Microcystis aeruginosa PCC 9809 genomic scaffold, AAI_H_2202_scaffold45, |
| | whole genome shotgun sequence |
| 997 | Okeania sp. SIO3I5 3I5_NODE_28, whole genome shotgun sequence |
| 998 | Leptolyngbya boryana NIES-2135 plasmid plasmid2 DNA, complete genome |
| 999 | Ga0315273_10103216 |
| 1000 | Chloroflexi bacterium isolate L227-5C MAG2_12, whole genome shotgun sequence |
| 1001 | Ga0315284_10065608 |
| 1002 | Microcystis aeruginosa NIES-88 scaffold5, whole genome shotgun sequence |
| 1003 | Candidatus Poribacteria bacterium isolate PCPOR4 Ga0207198_1058, whole |
| | genome shotgun sequence |
| 1004 | Ga0315295_10027354 |
| 1005 | Coleofasciculus chthonoplastes PCC 7420 ctg_1103659003742, whole genome |
| | shotgun sequence |
| 1006 | Ga0315294_10022559 |
| 1007 | Ga0315279_10047182 |
| 1008 | Cyanobacteria bacterium QH_6_48_35 qh_6_scaffold_2052, whole genome shotgun |
| | sequence |
| 1009 | Scytonema sp. UIC 10036 c00074_NODE_74 . . . , whole genome shotgun sequence |
| 1010 | Leptolyngbyaceae cyanobacterium RU_5_1 |
| | NODE_917_length_22282_cov_3.725254, whole genome shotgun sequence |
| 1011 | Scytonema sp. RU_4_4 NODE_236_length_45534_cov_15.648975, whole genome |
| | shotgun sequence |
| 1012 | Hydrocoleum sp. CS-953 1482, whole genome shotgun sequence |
| 1013 | Candidatus Poribacteria bacterium isolate SB0661_bin_29 |
| | NODE_309_length_90992_cov_74.217854, whole genome shotgun sequence |
| 1014 | Leptolyngbya sp. FACHB-238 contig17, whole genome shotgun sequence |
| 1015 | Microcystis phage MaMV-DC, complete genome |
| 1016 | Ga0315295_10001383 |
| 1017 | Candidatus Poribacteria bacterium bin44 |
| | NODE_9134_length_5559_cov_19.1806_ID_18267, whole genome shotgun |
| | sequence |
| 1018 | Richelia sp. CSU_2_1 NODE_121_length_49199_cov_8.4043, whole genome |
| | shotgun sequence |
| 1019 | Coleofasciculus chthonoplastes PCC 7420 ctg_1103659003743, whole genome |
| | shotgun sequence |
| 1020 | Sulfobacillus thermosulfidooxidans isolate AMDSBA5 AMDSBA5_98, whole |
| | genome shotgun sequence |
| 1021 | Ga0315277_10007795 |
| 1022 | Microcystis flos-aquae Mf_QC_C_20070823_S20D S20D_80, whole genome |
| | shotgun sequence |
| 1023 | Calditerricola satsumensis JCM 14719 DNA, sequence008, whole genome shotgun |
| | sequence |
| 1024 | Ga0373628_0134704 |
| 1025 | Microcystis aeruginosa NIES-88 scaffold3, whole genome shotgun sequence |
| 1026 | Calothrix sp. FACHB-1219 contig10, whole genome shotgun sequence |
| 1027 | Dolichospermum sp. UHCC 0406 scaffold19_cov315, whole genome shotgun |
| | sequence |
| 1028 | Ga0315285_10061643 |
| 1029 | Synechococcus sp. PCC 7335 ctg_1103496006870, whole genome shotgun sequence |
| 1030 | Cyanobacteria bacterium SW_6_48_11 sw_6_scaffold_1338, whole genome shotgun |
| | sequence |
| 1031 | Synechococcus sp. PCC 7335 ctg_1103496006867, whole genome shotgun sequence |
| 1032 | Planktothrix agardhii NIVA-CYA 56/3 contig00132, whole genome shotgun |
| | sequence |
| 1033 | Oscillatoriales cyanobacterium isolate PH2015_13D_45_19 |
| | PH2015_13D_scaffold_258, whole genome shotgun sequence |
| 1034 | TPA_asm: Cyanobacteria bacterium UBA8553 contig_3714, whole genome shotgun |
| | sequence |
| 1035 | Oscillatoriales cyanobacterium CG2_30_40_61 cg2_3.0_scaffold_1268_c, whole |
| | genome shotgun sequence |
| 1036 | Ga0315279_10000180 |
| 1037 | Coleofasciculus chthonoplastes PCC 7420 ctg_1103659003670, whole genome |
| | shotgun sequence |
| 1038 | Ga0315273_10129206 |
| 1039 | Dolichospermum sp. UHCC 0299 scaffold121_cov0, whole genome shotgun |
| | sequence |
| 1040 | Ga0315285_10084064 |
| 1041 | Prochlorothrix hollandica PCC 9006 = CALU 1027 strain PCC 9006 |
| | Pro9006DRAFT_Contig5.9_C24, whole genome shotgun sequence |
| 1042 | Oscillatoriales cyanobacterium isolate PH2015_08D_46_1646 |
| | PH2015_08D_scaffold_5805, whole genome shotgun sequence |
| 1043 | Symploca sp. SIO2E9 2E9_NODE_71, whole genome shotgun sequence |
| 1044 | Oscillatoriales cyanobacterium isolate PH2015_07D_45_11 |
| | PH2015_07D_scaffold_416, whole genome shotgun sequence |
| 1045 | Ga0373625_0078553 |
| 1046 | Aphanothece sacrum FPU3 DNA, contig: ASFPU3_contig081, whole genome |
| | shotgun sequence |
| 1047 | Coleofasciculus sp. C3-bin4 k141_1828533_length_9803_cov_7.0000, whole |
| | genome shotgun sequence |
| 1048 | Hydrococcus sp. CRU_1_1 NODE_214_length_36770_cov_3.82297, whole genome |
| | shotgun sequence |
| 1049 | Mastigocoleus testarum BC008 Contig-69, whole genome shotgun sequence |
| 1050 | Microcystis flos-aquae DF17 NODE_91_length_152052_cov_197.105, whole |
| | genome shotgun sequence |
| 1051 | Ga0373630_0000139 |
| 1052 | Sponge metagenome NODE_16204_length_5401_cov_3.76754_ID_32407, whole |
| | genome shotgun sequence |
| 1053 | Microcoleus sp. bin38.metabat.b11b12b14.051 WN_Microcoleus_2_scaffold_29, |
| | whole genome shotgun sequence |
| 1054 | Thermincola ferriacetica strain Z-0001 Tfer_ctg04, whole genome shotgun sequence |
| 1055 | Ga0315284_10013693 |
| 1056 | Chlorogloeopsis fritschii PCC 6912 sequence18, whole genome shotgun sequence |
| 1057 | Nostoc sp. ATCC 53789 scaffold95.1, whole genome shotgun sequence |
| 1058 | Cyanobacteria bacterium J083 k99_1223732, whole genome shotgun sequence |
| 1059 | Acaryochloris sp. CCMEE 5410 contig00452, whole genome shotgun sequence |
| 1060 | Brasilonema bromeliae SPC951 NODE_2093_length_16008_cov_5.537140, whole |
| | genome shotgun sequence |
| 1061 | Microcystis aeruginosa NIES-3804 DNA, sequence020, whole genome shotgun |
| | sequence |
| 1062 | Moorea sp. SIO4E2 4E2_NODE_211, whole genome shotgun sequence |
| 1063 | Candidatus Poribacteria bacterium isolate SB0668_bin_40 |
| | NODE_6291_length_5861_cov_5.669480, whole genome shotgun sequence |
| 1064 | Dolichospermum sp. UHCC 0406 scaffold19_cov315, whole genome shotgun |
| | sequence |
| 1065 | Arthrospira platensis NIES-46 DNA, sequence091, whole genome shotgun sequence |
| 1066 | Candidatus Poribacteria bacterium isolate SB0672_bin_19 |
| | NODE_4287_length_5454_cov_6.569735, whole genome shotgun sequence |
| 1067 | Dolichospermum sp. UHCC 0259 scaffold237_cov0, whole genome shotgun |
| | sequence |
| 1068 | Dolichospermum sp. UHCC 0352 scaffold173_cov0, whole genome shotgun |
| | sequence |
| 1069 | Calothrix sp. HK-06 NIES-2101_Scaffold_160, whole genome shotgun sequence |
| 1070 | fermentation metagenome genome assembly, contig: |
| | NODE_71_length_108958_cov_61.855514, whole genome shotgun sequence |
| 1071 | Moorea sp. SIO3B2 3B2_NODE_204, whole genome shotgun sequence |
| 1072 | Ga0315284_10116105 |
| 1073 | Ga0373628_0002741 |
| 1074 | Nostoc sp. PCC 7120 = FACHB-418 contig49, whole genome shotgun sequence |
| 1075 | Mastigocoleus testarum BC008 Contig-75, whole genome shotgun sequence |
| 1076 | Prochlorothrix hollandica PCC 9006 = CALU 1027 strain PCC 9006 |
| | Pro9006DRAFT_Contig10.1_C42, whole genome shotgun sequence |
| 1077 | bioreactor sludge metagenome genome assembly, contig: |
| | NODE_19_length_148633_cov_33.775869, whole genome shotgun sequence |
| 1078 | Ga0315280_10003927 |
| 1079 | TPA_asm: Microcoleaceae bacterium UBA10368 contig_309, whole genome |
| | shotgun sequence |
| 1080 | Cyanobacteria bacterium QH_7_48_89 qh_7_scaffold_1052, whole genome shotgun |
| | sequence |
| 1081 | Coleofasciculus chthonoplastes PCC 7420 ctg_1103659003681, whole genome |
| | shotgun sequence |
| 1082 | Microcystis aeruginosa NIES-44 DNA, contig: contig1_21, strain: NIES-44, whole |
| | genome shotgun sequence |
| 1083 | Calothrix elsteri CCALA 953 scaffold16, whole genome shotgun sequence |
| 1084 | Acidithiobacillus thiooxidans strain CLST scaffold00011, whole genome shotgun |
| | sequence |
| 1085 | Ga0315296_10000501 |
| 1086 | Moorea producens 3L ctg45847, whole genome shotgun sequence |
| 1087 | Oscillatoriales cyanobacterium isolate PH2015_14S_45_132 |
| | PH2015_14S_scaffold_482, whole genome shotgun sequence |
| 1088 | Ga0315280_10070155 |
| 1089 | Candidatus Poribacteria bacterium isolate PCPOR1 Ga0206387_1076, whole |
| | genome shotgun sequence |
| 1090 | Candidatus Poribacteria bacterium isolate PCPOR4 Ga0207198_1143, whole |
| | genome shotgun sequence |
| 1091 | Candidatus Poribacteria bacterium isolate Plut_88864 |
| | filtered_Plut_88864_genomic_contig_5604, whole genome shotgun sequence |
| 1092 | Scytonema sp. HK-05 NIES-2130_Scaffold_4, whole genome shotgun sequence |
| 1093 | TPA_asm: Synechococcus sp. isolate SpSt-285 Ga0101945_1002032, whole genome |
| | shotgun sequence |
| 1094 | Coleofasciculus chthonoplastes PCC 7420 ctg_1103659003671, whole genome |
| | shotgun sequence |
| 1095 | Ga0373630_0000877 |
| 1096 | Cyanobacteria bacterium QS_9_48_30 qs_9_scaffold_2173, whole genome shotgun |
| | sequence |
| 1097 | TPA_asm: Syntrophomonas sp. UBA4807 UBA4807_contig_171181, whole genome |
| | shotgun sequence |
| 1098 | Microcystis aeruginosa NIES-44 DNA, contig: contig2_19, strain: NIES-44, whole |
| | genome shotgun sequence |
| 1099 | Microcystis panniformis Mp_MB_F_20051200_S9D S9D_312, whole genome |
| | shotgun sequence |
| 1100 | Ga0315295_10006545 |
| 1101 | metagenomes genome assembly, contig: NODE_4045_length_4818_cov_2.671426, |
| | whole genome shotgun sequence |
| 1102 | Oscillatoriales cyanobacterium isolate PH2015_09S_45 247 |
| | PH2015_09S_scaffold_420, whole genome shotgun sequence |
| 1103 | Moorea sp. SIO4A1 4A1_NODE_34, whole genome shotgun sequence |
| 1104 | Oscillatoriales cyanobacterium isolate PH2015_07U_46_236 |
| | PH2015_07U_scaffold_109, whole genome shotgun sequence |
| 1105 | Ga0373625_0000114 |
| 1106 | Microcystis aeruginosa F13-15 Ga0187998_10047, whole genome shotgun sequence |
| 1107 | Moorea sp. SIO4E2 4E2_NODE_6, whole genome shotgun sequence |
| 1108 | Coleofasciculus sp. Co-bin14 k141_4776899_length_6599_cov_7.0000, whole |
| | genome shotgun sequence |
| 1109 | Ga0315279_10074524 |
| 1110 | TPA_asm: Richelia sp. UBA3957 UBA3957_contig_489, whole genome shotgun |
| | sequence |
| 1111 | Ga0315294_10043458 |
| 1112 | Pleurocapsa sp. PCC 7319 genomic scaffold Pleur7319scaffold_3, whole genome |
| | shotgun sequence |
| 1113 | Oscillatoriales cyanobacterium isolate PH2015_06S_46_2585 |
| | PH2015_06S_scaffold_13083, whole genome shotgun sequence |
| 1114 | Nostoc sp. 106C 19_117334_26.4148_51_117334_0.395332981062608, whole |
| | genome shotgun sequence |
| 1115 | Cyanobacteria bacterium QS_6_48_18 qs_6_scaffold_1172, whole genome shotgun |
| | sequence |
| 1116 | Moorea sp. SIO3E8 3E8_NODE_21, whole genome shotgun sequence |
| 1117 | Microcystis wesenbergii Mw_QC_B_20070930_S4 S4_116, whole genome shotgun |
| | sequence |
| 1118 | Oscillatoria sp. isolate S11.Bin022 Scaffold_23, whole genome shotgun sequence |
| 1119 | Scytonema sp. UIC 10036 c00129_NODE_12 . . . , whole genome shotgun sequence |
| 1120 | Ga0373626_0013195 |
| 1121 | Methanoculleus sp. isolate WOFA03 NODE_6082_length_5724_cov_31.431293, |
| | whole genome shotgun sequence |
| 1122 | Gloeocapsa sp. PCC 73106 scaffold_00137, whole genome shotgun sequence |
| 1123 | Lyngbya sp. PCC 8106 1099428180525, whole genome shotgun sequence |
| 1124 | Chamaesiphon polymorphus CCALA 037 |
| | NODE_187_length_14934_cov_6.09504_ID_66389, whole genome shotgun |
| | sequence |
| 1125 | Hydrococcus sp. RU_2_2 NODE_50_length_83323_cov_3.681956, whole genome |
| | shotgun sequence |
| 1126 | Microcystis aeruginosa Ma_SC_T_19800800_S464 S464_237, whole genome |
| | shotgun sequence |
| 1127 | fermentation metagenome genome assembly, contig: |
| | NODE_8578_length_5580_cov_8.227511, whole genome shotgun sequence |
| 1128 | Oscillatoriales cyanobacterium isolate PH2015_07D_46_1245 |
| | PH2015_07D_scaffold_1762, whole genome shotgun sequence |
| 1129 | Richelia sp. SL_2_1 NODE_95_length_50065_cov_8.922143, whole genome |
| | shotgun sequence |
| 1130 | Moorea sp. SIO3I7 3I7_NODE_589, whole genome shotgun sequence |
| 1131 | Scytonema sp. HK-05 NIES-2130_Scaffold_20, whole genome shotgun sequence |
| 1132 | Microcystis aeruginosa 9701 WGS project CAIQ01000000 data, contig |
| | AAI_K_2204_21, whole genome shotgun sequence |
| 1133 | Ga0315273_10121282 |
| 1134 | Moorea sp. SIO4A3 4A3_NODE_797, whole genome shotgun sequence |
| 1135 | Desulfotomaculum australicum DSM 11792 genome assembly, contig: |
| | EJ60DRAFT_scaffold00036.36, whole genome shotgun sequence |
| 1136 | Ga0373630_0013875 |
| 1137 | Mastigocoleus testarum BC008 YY1DRAFT_scaffold_68.69_C, whole genome |
| | shotgun sequence |
| 1138 | sediment metagenome genome assembly, contig: |
| | NODE_72_length_3716_cov_2.895930, whole genome shotgun sequence |
| 1139 | Ga0315285_10058279 |
| 1140 | Aphanothece sacrum FPU3 DNA, contig: ASFPU3_contig081, whole genome |
| | shotgun sequence |
| 1141 | Oscillatoriales cyanobacterium isolate PH2015_04D_45_965 |
| | PH2015_04D_scaffold_1308, whole genome shotgun sequence |
| 1142 | Archaeon SCG-AAA382B04 isolate SCG-AAA382B04 AAA382B04_1, whole |
| | genome shotgun sequence |
| 1143 | Geitlerinema sp. PCC 7105 Gei7105DRAFT_GPC.5_C29, whole genome shotgun |
| | sequence |
| 1144 | Candidatus Poribacteria bacterium isolate PCPOR1 Ga0206387_1124, whole |
| | genome shotgun sequence |
| 1145 | Candidatus Poribacteria bacterium isolate SB0672_bin_19 |
| | NODE_3818_length_5909_cov_5.206355, whole genome shotgun sequence |
| 1146 | Anabaena lutea FACHB-196 contig37, whole genome shotgun sequence |
| 1147 | Microcystis aeruginosa NIES-4264 DNA, contig_41, whole genome shotgun |
| | sequence |
| 1148 | Ardenticatenales bacterium isolate MGR_bin47 SD2897-2912_k127_572466, whole |
| | genome shotgun sequence |
| 1149 | Ga0315294_10088530 |
| 1150 | Brasilonema sp. UFV-L1 scaffold102_cov13, whole genome shotgun sequence |
| 1151 | Chloroflexi bacterium isolate CF_117 14_0929_09_20cm_scaffold_32114, whole |
| | genome shotgun sequence |
| 1152 | Synechococcus sp. PCC 7335 scf_1103496006892 genomic scaffold, whole genome |
| | shotgun sequence |
| 1153 | [Scytonema hofmanni] UTEX 2349 Tol9009DRAFT_TPD.8_C41, whole genome |
| | shotgun sequence |
| 1154 | Oscillatoriales cyanobacterium isolate PH2015_07D 46 1245 |
| | PH2015_07D_scaffold_1861, whole genome shotgun sequence |
| 1155 | Microcystis flos-aquae FACHB-1344 contig135, whole genome shotgun sequence |
| 1156 | Ga0373626_0004519 |
| 1157 | Crocosphaera watsonii WH 8501 ctg345, whole genome shotgun sequence |
| 1158 | Oscillatoriales cyanobacterium isolate PH2015_01D_44_513 |
| | PH2015_01D_scaffold_4440, whole genome shotgun sequence |
| 1159 | Ga0373629_0013319 |
| 1160 | fermentation metagenome genome assembly, contig: |
| | NODE_6106_length_8625_cov_8.304084, whole genome shotgun sequence |
| 1161 | Candidatus Poribacteria bacterium isolate PCPOR2a Ga0207197_1069, whole |
| | genome shotgun sequence |
| 1162 | Candidatus Poribacteria bacterium isolate AGPOR5 scf7180000041070, whole |
| | genome shotgun sequence |
| 1163 | Ga0373625_0098307 |
| 1164 | Okeania sp. KiyG1 DNA, sequence085, whole genome shotgun sequence |
| 1165 | Crocosphaera watsonii WH 0005 WGS project CAQL00000000 data, contig 01056, |
| | whole genome shotgun sequence |
| 1166 | Scytonema sp. UIC 10036 c00414_NODE_41 . . . , whole genome shotgun sequence |
| 1167 | Candidatus Gracilibacteria bacterium isolate SU_1_2 |
| | NODE_2830_length_5569_cov_3.759096, whole genome shotgun sequence |
| 1168 | Planktothrix prolifica NIVA-CYA 540 contig00042, whole genome shotgun |
| | sequence |
| 1169 | Crocosphaera sp. isolate DT_26 DT-Crocosphaera-1_scaffold_601, whole genome |
| | shotgun sequence |
| 1170 | Candidatus Poribacteria bacterium isolate PCPOR4 Ga0207198_1028, whole |
| | genome shotgun sequence |
| 1171 | Chlorogloeopsis fritschii PCC 6912 contig00059, whole genome shotgun sequence |
| 1172 | Moorea sp. SIO4G2 4G2_NODE_3083, whole genome shotgun sequence |
| 1173 | Cyanobacteria bacterium QH_6_48_35 qh_6_scaffold_2052, whole genome shotgun |
| | sequence |
| 1174 | TPA_asm: Cyanobacteria bacterium UBA8553 contig_1147, whole genome shotgun |
| | sequence |
| 1175 | Microcystis aeruginosa Ma_SC_T_19800800_S464 S464_89, whole genome |
| | shotgun sequence |
| 1176 | wastewater metagenome genome assembly, contig: |
| | NODE_10_length_147907_cov_31.462266, whole genome shotgun sequence |
| 1177 | TPA_asm: Cyanobacteria bacterium UBA8803 contig_185, whole genome shotgun |
| | sequence |
| 1178 | Scytonema sp. CRU_2_7 NODE_5865_length_4978_cov_2.76335, whole genome |
| | shotgun sequence |
| 1179 | Moorea sp. SIO3H5 3H5_NODE_395, whole genome shotgun sequence |
| 1180 | Ga0315298_1001267 |
| 1181 | Tolypothrix sp. T3-bin4 k141_222205_length_2371_cov_6.0000, whole genome |
| | shotgun sequence |
| 1182 | Candidatus Poribacteria bacterium isolate SB0668_bin_40 |
| | NODE_1215_length_20491_cov_8.127373, whole genome shotgun sequence |
| 1183 | Ga0315284_10084224 |
| 1184 | Ga0315280_10000556 |
| 1185 | Chlorogloeopsis fritschii PCC 6912 sequence18, whole genome shotgun sequence |
| 1186 | Microcystis aeruginosa NIES-2522 DNA, contig_16, whole genome shotgun |
| | sequence |
| 1187 | Nitrosococcus oceani strain AFC132 contig_24, whole genome shotgun sequence |
| 1188 | Microcystis flos-aquae Mf_QC_C_20070823_S10 S10_205, whole genome shotgun |
| | sequence |
| 1189 | Lyngbya majuscula 3L genomic scaffold scf52022, whole genome shotgun sequence |
| 1190 | Microcoleus sp. FACHB-84 contig13, whole genome shotgun sequence |
| 1191 | Ga0307928_10038209 |
| 1192 | metagenome genome assembly, contig: NODE_111_length_94772_cov_5.504176, |
| | whole genome shotgun sequence |
| 1193 | Planktothrix agardhii CCAP 1459/11A NIES-905 DNA, sequence019, whole |
| | genome shotgun sequence |
| 1194 | uncultured Oscillatoriales cyanobacterium isolate KTt_bin-1839 genome assembly, |
| | contig: bin-1839: 147/277, whole genome shotgun sequence |
| 1195 | Cyanobacteria bacterium QH_3_48_40 qh_3_scaffold_563, whole genome shotgun |
| | sequence |
| 1196 | Arthrospira platensis NIES-46 DNA, sequence003, whole genome shotgun sequence |
| 1197 | Crocosphaera watsonii WH 0401 WGS project CAQM00000000 data, contig 01078, |
| | whole genome shotgun sequence |
| 1198 | Crocosphaera watsonii WH 8502 WGS project CAQK00000000 data, contig 00002, |
| | whole genome shotgun sequence |
| 1199 | Microcoleus sp. Co-bin12 k141_6726532_length_3994_cov_14.2126, whole genome |
| | shotgun sequence |
| 1200 | Ga0373630_0001176 |
| 1201 | uncultured Microcoleus sp. isolate AVDCRST_MAG84 genome assembly, contig: |
| | NODE2305, whole genome shotgun sequence |
| 1202 | Candidatus Poribacteria bacterium isolate PCPOR4 Ga0207198_1029, whole |
| | genome shotgun sequence |
| 1203 | Sponge metagenome NODE_9472_length_8435_cov_19.5502_ID_18943, whole |
| | genome shotgun sequence |
| 1204 | Scytonema sp. UIC 10036 c00181_NODE_18 . . . , whole genome shotgun sequence |
| 1205 | Ga0315280_10000403 |
| 1206 | Brasilonema bromeliae SPC951 NODE_3533_length_9450_cov_4.016285, whole |
| | genome shotgun sequence |
| 1207 | Richelia sp. CSU_2_1 NODE_496_length_25657_cov_10.0371, whole genome |
| | shotgun sequence |
| 1208 | uncultured cyanobacterium isolate B12_bin-1940 genome assembly, contig: bin- |
| | 1940: 1549/1810, whole genome shotgun sequence |
| 1209 | Trichocoleus sp. FACHB-832 contig52, whole genome shotgun sequence |
| 1210 | Ga0315285_10002437 |
| 1211 | Hapalosiphonaceae cyanobacterium JJU2 Scaffold_54, whole genome shotgun |
| | sequence |
| 1212 | Oscillatoriales cyanobacterium isolate PH2015_08D_46_1646 |
| | PH2015_08D_scaffold_2263, whole genome shotgun sequence |
| 1213 | Microcystis aeruginosa NIES-87 DNA, sequence016, whole genome shotgun |
| | sequence |
| 1214 | Ga0307928_10013595 |
| 1215 | Scytonema sp. HK-05 NIES-2130_Scaffold_36, whole genome shotgun sequence |
| 1216 | uncultured archaeon isolate LFW-68_2 genome assembly, contig: LFW682_39, |
| | whole genome shotgun sequence |
| 1217 | fermentation metagenome genome assembly, contig: |
| | NODE_2539_length_14463_cov 6.300250, whole genome shotgun sequence |
| 1218 | Tychonema bourrellyi FEM_GT703 scaffold38_size30849, whole genome shotgun |
| | sequence |
| 1219 | Microcystis aeruginosa BLCCF108 NODE_334_length_13058_cov_116.817888, |
| | whole genome shotgun sequence |
| 1220 | Ga0315277_10011256 |
| 1221 | coral metagenome genome assembly, contig: |
| | NODE_159_length_19067_cov 12.431648, whole genome shotgun sequence |
| 1222 | Ktedonobacter sp. 13_1_20CM_3_54_15 13_1_20cm_3_scaffold_1163, whole |
| | genome shotgun sequence |
| 1223 | Ga0315273_10078206 |
| 1224 | Scytonema sp. HK-05 NIES-2130_Scaffold_10, whole genome shotgun sequence |
| 1225 | Scytonema sp. HK-05 NIES-2130_Scaffold_125, whole genome shotgun sequence |
| 1226 | fermentation metagenome genome assembly, contig: |
| | NODE_4309_length_10165_cov_34.872404, whole genome shotgun sequence |
| 1227 | Cyanobacteria bacterium RU_5_0 NODE_1542_length_16773_cov_21.027214, |
| | whole genome shotgun sequence |
| 1228 | TPA_asm: Richelia sp. UBA3958 UBA3958_contig_482, whole genome shotgun |
| | sequence |
| 1229 | Scytonema sp. UIC 10036 c00130_NODE_13 . . . , whole genome shotgun sequence |
| 1230 | Candidatus Chloroploca asiatica strain B7-9 |
| | NODE_14_length_96467_cov_78.3642_ID_198493, whole genome shotgun |
| | sequence |
| 1231 | Moorea sp. SIO3A2 3A2_NODE_46, whole genome shotgun sequence |
| 1232 | Pleurocapsa sp. CCALA 161 NODE_10_length_78268_cov_10.6832_ID_51584, |
| | whole genome shotgun sequence |
| 1233 | cyanobacterium TDX16 genomic scaffold Scaffold94, whole genome shotgun |
| | sequence |
| 1234 | Ga0315275_10032158 |
| 1235 | Ga0315295_10005530 |
| 1236 | Ga0373625_0144508 |
| 1237 | Moorea sp. SIO3I6 3I6_NODE_987, whole genome shotgun sequence |
| 1238 | Ga0373627_0035378 |
| 1239 | marine metagenome genome assembly, contig: |
| | NODE_5726_length_4256_cov_3.579325, whole genome shotgun sequence |
| 1240 | Ga0373629_0019898 |
| 1241 | Microcystis aeruginosa LG13-12 Ga0188023_10518, whole genome shotgun |
| | sequence |
| 1242 | Calothrix sp. HK-06 NIES-2101_Scaffold 160, whole genome shotgun sequence |
| 1243 | Ga0373627_0026263 |
| 1244 | Scytonema sp. UIC 10036 c00181_NODE_18 . . . , whole genome shotgun sequence |
| 1245 | uncultured Methanomicrobiales archaeon isolate AM-sed-core3-D1_bin-531 genome |
| | assembly, contig: bin-531: 147/408, whole genome shotgun sequence |
| 1246 | Microcystis panniformis Mp_MB_F_20051200_S9 S9_160, whole genome shotgun |
| | sequence |
| 1247 | Activated sludge metagenome, whole genome shotgun sequence |
| 1248 | Ga0373629_0001148 |
| 1249 | Ga0315280_10050744 |
| 1250 | TPA_asm: Blastocatellia bacterium isolate SpSt-338 Ga0073934_10003832, whole |
| | genome shotgun sequence |
| 1251 | Leptolyngbya valderiana BDU 20041 contig00137, whole genome shotgun sequence |
| 1252 | Anabaena catenula FACHB-362 contig6, whole genome shotgun sequence |
| 1253 | Kamptonema sp. SIO1D9 1D9_NODE_9, whole genome shotgun sequence |
| 1254 | Ga0373630_0100330 |
| 1255 | Ga0315285_10002913 |
| 1256 | Candidatus Poribacteria bacterium bin44 |
| | NODE_523_length_80671_cov_19.5214_ID_1045, whole genome shotgun sequence |
| 1257 | Sulfobacillus benefaciens isolate AMDSBA4 AMDSBA4_120, whole genome |
| | shotgun sequence |
| 1258 | Oscillatoriales cyanobacterium isolate PH2015_02D_45_1038 |
| | PH2015_02D_scaffold_875, whole genome shotgun sequence |
| 1259 | Oscillatoriales cyanobacterium isolate PH2015_08D_46_1646 |
| | PH2015_08D_scaffold_5893, whole genome shotgun sequence |
| 1260 | Terrestrial metagenome MPI_scaffold_4171, whole genome shotgun sequence |
| 1261 | Candidatus Poribacteria bacterium isolate SB0675_bin_22 |
| | NODE_1577_length_16369_cov_11.811818, whole genome shotgun sequence |
| 1262 | Microcystis aeruginosa PCC 9717 genomic scaffold, AAI_B_2196_scaffold69, |
| | whole genome shotgun sequence |
| 1263 | Oscillatoriales cyanobacterium isolate PH2015_13U_45_97 |
| | PH2015_13U_scaffold_350, whole genome shotgun sequence |
| 1264 | Ga0315284_10000891 |
| 1265 | Candidatus Methanoculleus thermohydrogenotrophicum isolate DTU006 |
| | scaffold1316, whole genome shotgun sequence |
| 1266 | Coleofasciculus sp. Co-bin14 k141_2884914_length_2356_cov_128.0000, whole |
| | genome shotgun sequence |
| 1267 | Ga0315280_10012508 |
| 1268 | Oscillatoriales cyanobacterium isolate PH2015_12U_45_315 |
| | PH2015_12U_scaffold_23, whole genome shotgun sequence |
| 1269 | Moorea sp. SIO2C4 2C4_NODE_1155, whole genome shotgun sequence |
| 1270 | Chlorogloea sp. CCALA 695 NODE_68_length_40204_cov_6.81018_ID_66494, |
| | whole genome shotgun sequence |
| 1271 | Microcystis flos-aquae Ma_QC_C_20070823_S18D S18D_53, whole genome |
| | shotgun sequence |
| 1272 | Brasilonema sp. UFV-L1 scaffold148_cov13, whole genome shotgun sequence |
| 1273 | Cyanobacteria bacterium J055 k99_1058335, whole genome shotgun sequence |
| 1274 | Candidatus Poribacteria bacterium isolate Plut_88864 |
| | filtered_Plut_88864_genomic_contig_44193, whole genome shotgun sequence |
| 1275 | Kouleothrix aurantiaca strain COM-B contig_39, whole genome shotgun sequence |
| 1276 | Desulfotomaculum australicum DSM 11792 genome assembly, contig: |
| | EJ60DRAFT_scaffold00036.36, whole genome shotgun sequence |
| 1277 | Ga0373626_0073864 |
| 1278 | Ga0373629_0071313 |
| 1279 | Ga0315279_10001675 |
| 1280 | Crocosphaera watsonii WH0402 WGS project CAQN00000000 data, contig 01993, |
| | whole genome shotgun sequence |
| 1281 | Microcystis aeruginosa NIES-2522 DNA, contig_18, whole genome shotgun |
| | sequence |
| 1282 | Ardenticatenales bacterium isolate MGR_bin47 SD2897-2912_k127_6618261, |
| | whole genome shotgun sequence |
| 1283 | wastewater metagenome genome assembly, contig: |
| | NODE_1502_length_9081_cov_7.120097, whole genome shotgun sequence |
| 1284 | Merismopedia glauca CCAP 1448/3 |
| | NODE_172_length_31568_cov_6.44124_ID_38037, whole genome shotgun |
| | sequence |
| 1285 | Oscillatoriales cyanobacterium isolate PH2015_10S_46_199 |
| | PH2015_10S_scaffold_548, whole genome shotgun sequence |
| 1286 | Limnoraphis robusta CS-951 contig188, whole genome shotgun sequence |
| 1287 | Scytonema hofmannii FACHB-248 contig8, whole genome shotgun sequence |
| 1288 | Ga0315280_10043499 |
| 1289 | Ga0315280_10014824 |
| 1290 | Candidatus Poribacteria bacterium isolate Plut_88885 |
| | unfiltered_Plut_88885_genomic_contig_871155, whole genome shotgun sequence |
| 1291 | Oscillatoriales cyanobacterium isolate PH2015_08D_45_74 |
| | PH2015_08D_scaffold_552, whole genome shotgun sequence |
| 1292 | Pleurocapsa sp. PCC 7319 Pleur7319scaffold_3_Cont9, whole genome shotgun |
| | sequence |
| 1293 | Ardenticatenales bacterium isolate MGR_bin47 SD2897-2912_k127_572466, whole |
| | genome shotgun sequence |
| 1294 | Symploca sp. SIO3C6 3C6_NODE_19, whole genome shotgun sequence |
| 1295 | Planktothrix agardhii NIVA-CYA 34 contig00003, whole genome shotgun sequence |
| 1296 | uncultured cyanobacterium isolate B12_bin-0982 genome assembly, contig: bin- |
| | 0982: 115/268, whole genome shotgun sequence |
| 1297 | TPA asm: Oscillatoriales bacterium UBA8482 contig_54582, whole genome |
| | shotgun sequence |
| 1298 | Chlorogloeopsis fritschii PCC 6912 contig00060, whole genome shotgun sequence |
| 1299 | Ga0315294_10112621 |
| 1300 | Cyanobacteria bacterium QH_10_48_56 qh_10_scaffold_929, whole genome |
| | shotgun sequence |
| 1301 | Crocosphaera watsonii WH 8501 ctg345, whole genome shotgun sequence |
| 1302 | Candidatus Poribacteria bacterium isolate SB0675_bin_22 |
| | NODE_1031_length_22403_cov_12.518346, whole genome shotgun sequence |
| 1303 | TPA_asm: Microcoleaceae bacterium UBA9251 contig_918, whole genome shotgun |
| | sequence |
| 1304 | TPA_asm: Richelia sp. UBA3308 UBA3308_contig_2520, whole genome shotgun |
| | sequence |
| 1305 | Scytonema sp. RU_4_4 NODE_486_length_31581_cov_12.788962, whole genome |
| | shotgun sequence |
| 1306 | Desulfovirgula thermocuniculi DSM 16036 G454DRAFT_scaffold00006.6_C, whole |
| | genome shotgun sequence |
| 1307 | Ardenticatenales bacterium isolate MGR_bin47 SD2897-2912_k127_4223749, |
| | whole genome shotgun sequence |
| 1308 | Microcystis aeruginosa Ma_OC_H_19870700_S124 S124_61, whole genome |
| | shotgun sequence |
| 1309 | Oscillatoriales cyanobacterium isolate PH2015_01D_44_513 |
| | PH2015_01D_scaffold_6706, whole genome shotgun sequence |
| 1310 | Ga0315284_10000823 |
| 1311 | TPA_asm: Cyanobacteria bacterium UBA11369 contig_453, whole genome shotgun |
| | sequence |
| 1312 | uncultured Opitutae bacterium isolate MJ-time_bin-6334 genome assembly, contig: |
| | bin-6334: 077/164, whole genome shotgun sequence |
| 1313 | Ga0373626_0107639 |
| 1314 | Ga0307928_10000796 |
| 1315 | Mastigocoleus testarum BC008 Contig-75, whole genome shotgun sequence |
| 1316 | Microbial mat metagenome MIS-Ph1_c201, whole genome shotgun sequence |
| 1317 | Ga0315294_10113088 |
| 1318 | Microcystis aeruginosa 11-30S32 DNA, 11-30S32contig365, whole genome shotgun |
| | sequence |
| 1319 | Sulfobacillus sp. DSM 109850 NODE_109_length_10971_cov_117.928952, whole |
| | genome shotgun sequence |
| 1320 | Ga0315273_10035469 |
| 1321 | Chloroflexi bacterium isolate B30_G2 B30_Guay2_scaffold_03813, whole genome |
| | shotgun sequence |
| 1322 | Scytonema sp. UIC 10036 c00181_NODE_18 . . . , whole genome shotgun sequence |
| 1323 | TPA_asm: Cyanobacteria bacterium UBA11368 contig_1385, whole genome |
| | shotgun sequence |
| 1324 | Microcystis aeruginosa Ma_SC_T_19800800_S464 S464_237, whole genome |
| | shotgun sequence |
| 1325 | Coleofasciculus chthonoplastes PCC 7420 ctg_1103659003736, whole genome |
| | shotgun sequence |
| 1326 | uncultured cyanobacterium isolate B12_bin-0982 genome assembly, contig: bin- |
| | 0982: 254/268, whole genome shotgun sequence |
| 1327 | Oscillatoriales cyanobacterium isolate PH2015_06S_54_30 |
| | PH2015_06S_scaffold_4063, whole genome shotgun sequence |
| 1328 | Hydrococcus sp. RU_2_2 NODE_1097_length_20307_cov_3.458276, whole |
| | genome shotgun sequence |
| 1329 | Brasilonema bromeliae SPC951 NODE_2367_length_14264_cov_4.685270, whole |
| | genome shotgun sequence |
| 1330 | Ga0315284_10131710 |
| 1331 | Moorea sp. SIO4G2 4G2_NODE_3083, whole genome shotgun sequence |
| 1332 | Moorea sp. SIO2I5 2I5_NODE_1588, whole genome shotgun sequence |
| 1333 | activated sludge metagenome genome assembly, contig: |
| | NODE_7171_length_4072_cov_711.029, whole genome shotgun sequence |
| 1334 | uncultured Microcoleus sp. isolate AVDCRST_MAG84 genome assembly, contig: |
| | NODE1784, whole genome shotgun sequence |
| 1335 | Ga0307928_10010650 |
| 1336 | Scytonema sp. UIC 10036 c00129_NODE_12 . . . , whole genome shotgun sequence |
| 1337 | Planktothrix prolifica NIVA-CYA 98 contig00006, whole genome shotgun sequence |
| 1338 | Synechococcus sp. PCC 7335 ctg_1103496006875, whole genome shotgun sequence |
| 1339 | Ga0315285_10061643 |
| 1340 | Ga0373625_0099120 |
| 1341 | Coleofasciculaceae cyanobacterium RL_1_1 |
| | NODE_927_length_11201_cov_3.089760, whole genome shotgun sequence |
| 1342 | Crocosphaera watsonii WH 0005 WGS project CAQL00000000 data, contig 00096, |
| | whole genome shotgun sequence |
| 1343 | Ga0315285_10001508 |
| 1344 | Microcoleus chthonoplastes PCC 7420 scf_1103659003800 genomic scaffold, whole |
| | genome shotgun sequence |
| 1345 | Oscillatoriales cyanobacterium isolate PH2015_02D_45_1038 |
| | PH2015_02D_scaffold_702, whole genome shotgun sequence |
| 1346 | TPA_asm: Cyanobacteria bacterium UBA11372 contig_575, whole genome shotgun |
| | sequence |
| 1347 | TPA_asm: Pseudanabaena sp. UBA1465 UBA1465_contig_2117, whole genome |
| | shotgun sequence |
| 1348 | Candidatus Poribacteria bacterium isolate Plut_88885 |
| | unfiltered_Plut_88885_genomic_contig_552830, whole genome shotgun sequence |
| 1349 | Ktedonobacter sp. 13_1_20CM_4_53_11 13_1_20cm_4_scaffold_1247, whole |
| | genome shotgun sequence |
| 1350 | Ga0373628_0143129 |
| 1351 | Ga0307928_10017022 |
| 1352 | Scytonema sp. UIC 10036 c00161_NODE_16 . . . , whole genome shotgun sequence |
| 1353 | coral metagenome genome assembly, contig: |
| | NODE_189_length_14262_cov_7.383786, whole genome shotgun sequence |
| 1354 | cyanobacterium TDX16 genomic scaffold Scaffold94, whole genome shotgun |
| | sequence |
| 1355 | Ga0373626_0068106 |
| 1356 | Symploca sp. SIO1B1 1B1_NODE_765, whole genome shotgun sequence |
| 1357 | Candidatus Poribacteria bacterium isolate PNGco_C_binSS2 scaffold_249, whole |
| | genome shotgun sequence |
| 1358 | Ga0315284_10173532 |
| 1359 | Ga0315279_10038201 |
| 1360 | Moorea sp. SIO2I5 2I5_NODE_1588, whole genome shotgun sequence |
| 1361 | Halothece sp. KZN 001 cyano_08_contig_431, whole genome shotgun sequence |
| 1362 | Planktothrix prolifica NIVA-CYA 98 contig00257, whole genome shotgun sequence |
| 1363 | Sediment metagenome Contig_342, whole genome shotgun sequence |
| 1364 | Ga0255812_10495892 |
| 1365 | Candidatus Poribacteria bacterium isolate SB0662_bin_35 |
| | NODE_7525_length_6951_cov_34.020302, whole genome shotgun sequence |
| 1366 | Methanocalculus sp. isolate CSSed165cm_604R1 CSSed16-5cm-4263, whole |
| | genome shotgun sequence |
| 1367 | Planktothrix sp. FACHB-1355 contig495, whole genome shotgun sequence |
| 1368 | TPA_asm: Cyanobacteria bacterium UBA11049 contig_22115, whole genome |
| | shotgun sequence |
| 1369 | uncultured Oscillatoriales cyanobacterium isolate Day2-6_bin-615 genome assembly, |
| | contig: bin-615: 0522/1053, whole genome shotgun sequence |
| 1370 | Leptolyngbya sp. FACHB-239 contig16, whole genome shotgun sequence |
| 1371 | Candidatus Poribacteria bacterium isolate SB0675_bin_22 |
| | NODE_404_length_42574_cov_13.168842, whole genome shotgun sequence |
| 1372 | metagenome genome assembly, contig: NODE_4871_length_9566_cov_272.221203, |
| | whole genome shotgun sequence |
| 1373 | Anabaena sp. FACHB-709 contig44, whole genome shotgun sequence |
| 1374 | Moorea producens 3L ctg45798, whole genome shotgun sequence |
| 1375 | Crocosphaera watsonii WH 8502 WGS project CAQK00000000 data, contig 00461, |
| | whole genome shotgun sequence |
| 1376 | Ga0373628_0000972 |
| 1377 | fermentation metagenome genome assembly, contig: |
| | NODE_1189_length_28905_cov_9.161906, whole genome shotgun sequence |
| 1378 | Oscillatoriales cyanobacterium isolate PH2015_01U_45_14 |
| | PH2015_01U_scaffold_206, whole genome shotgun sequence |
| 1379 | Ga0315284_10133469 |
| 1380 | Ga0373630_0081576 |
| 1381 | Leptolyngbya sp. FACHB-541 contig14, whole genome shotgun sequence |
| 1382 | Microcystis aeruginosa Ma_QC_B_20070730_S2 S2_44, whole genome shotgun |
| | sequence |
| 1383 | Ga0373625_0195404 |
| 1384 | Symploca sp. SIO2C1 2C1_NODE_95, whole genome shotgun sequence |
| 1385 | Gloeocapsa sp. PCC 73106 scaffold_00213, whole genome shotgun sequence |
| 1386 | Microcoleus sp. SM1_3_4 NODE_1886_length_13372_cov_2.009589, whole |
| | genome shotgun sequence |
| 1387 | Planktothrix mougeotii NIVA-CYA 405 contig00127, whole genome shotgun |
| | sequence |
| 1388 | Moorea sp. SIO3G5 3G5_NODE_356, whole genome shotgun sequence |
| 1389 | Tychonema bourrellyi FEM_GT703 scaffold98_size18864, whole genome shotgun |
| | sequence |
| 1390 | TPA_asm: Candidatus Bathyarchaeota archaeon isolate SpSt-1006 |
| | Ga0123519_10026078, whole genome shotgun sequence |
| 1391 | Ga0373625_0005445 |
| 1392 | Candidatus Poribacteria bacterium isolate SB0672_bin_19 |
| | NODE_10240_length_2960_cov_3.738382, whole genome shotgun sequence |
| 1393 | Moorea sp. SIO2B7 2B7_NODE_1079, whole genome shotgun sequence |
| 1394 | Candidatus Poribacteria bacterium bin44 |
| | NODE_1143_length_51058_cov_18.8876_ID_2285, whole genome shotgun |
| | sequence |
| 1395 | Moorea sp. SIO2C4 2C4_NODE_709, whole genome shotgun sequence |
| 1396 | Microcystis sp. T1-4 WGS project CAIP01000000 data, contig AAI_I_2203_23, |
| | whole genome shotgun sequence |
| 1397 | Arthrospira sp. PCC 8005, WGS project CAFN00000000 data, strain PCC 8005, |
| | Contig4958-2130, whole genome shotgun sequence |
| 1398 | Candidatus Bathyarchaeota archaeon BA1 ba1_04, whole genome shotgun sequence |
| 1399 | Okeania sp. SIO3B5 3B5_NODE_236, whole genome shotgun sequence |
| 1400 | Ga0315295_10030336 |
| 1401 | Sponge metagenome NODE_28028_length_3465_cov_3.81096_ID_56055, whole |
| | genome shotgun sequence |
| 1402 | Ga0315296_10008306 |
| 1403 | TPA_asm: Cyanobacteria bacterium UBA12227 contig_617, whole genome shotgun |
| | sequence |
| 1404 | Ga0315295_10030299 |
| 1405 | Crocosphaera watsonii WH 0003 Contig00520, whole genome shotgun sequence |
| 1406 | Kamptonema sp. SIO4C4 4C4_NODE_1097, whole genome shotgun sequence |
| 1407 | freshwater metagenome genome assembly, contig: |
| | NODE_87_length_5282_cov_5.874685, whole genome shotgun sequence |
| 1408 | Moorea sp. SIO3G5 3G5_NODE_1620, whole genome shotgun sequence |
| 1409 | Ga0373629_0021606 |
| 1410 | Scytonema sp. HK-05 NIES-2130_Scaffold_72, whole genome shotgun sequence |
| 1411 | Microcystis panniformis Mp_MB_F_20051200_S6D S6D_8, whole genome shotgun |
| | sequence |
| 1412 | Ga0315280_10050637 |
| 1413 | Candidatus Poribacteria bacterium isolate SB0669_bin_10 |
| | NODE_4394_length_4900_cov_7.727761, whole genome shotgun sequence |
| 1414 | Ga0315280_10000252 |
| 1415 | Microcoleus sp. Co-bin12 k141_16798132_length_1964_cov_17.0000, whole |
| | genome shotgun sequence |
| 1416 | Ga0315284_10166547 |
| 1417 | Ga0315284_10098300 |
| 1418 | Moorea sp. SIO3I7 3I7_NODE_1751, whole genome shotgun sequence |
| 1419 | Okeania sp. SIO3B5 3B5_NODE_379, whole genome shotgun sequence |
| 1420 | Microcystis flos-aquae Mf_QC_C_20070823_S20 S20_49, whole genome shotgun |
| | sequence |
| 1421 | Limnospira fusiformis KN contig55, whole genome shotgun sequence |
| 1422 | Dolichospermum sp. UHCC 0299 scaffold121_cov0, whole genome shotgun |
| | sequence |
| 1423 | Crocosphaera watsonii WH 0003 Contig00520, whole genome shotgun sequence |
| 1424 | Candidatus Poribacteria bacterium isolate SB0663_bin_6 |
| | NODE_1869_length_7015_cov_7.269828, whole genome shotgun sequence |
| 1425 | Ga0373629_0000692 |
| 1426 | Calothrix elsteri CCALA 953 scaffold16, whole genome shotgun sequence |
| 1427 | uncultured cyanobacterium isolate A5_bin-0177 genome assembly, contig: bin- |
| | 0177: 296/358, whole genome shotgun sequence |
| 1428 | Anabaena catenula FACHB-362 contig23, whole genome shotgun sequence |
| 1429 | Ga0315284_10114303 |
| 1430 | Candidatus Poribacteria bacterium isolate PCPOR1 Ga0206387_1124, whole |
| | genome shotgun sequence |
| 1431 | Ga0315294_10032729 |
| 1432 | Ga0315275_10057549 |
| 1433 | Scytonema hofmannii FACHB-248 contig68, whole genome shotgun sequence |
| 1434 | Oscillatoriales cyanobacterium isolate PH2015_03D_45_235 |
| | PH2015_03D_scaffold_616, whole genome shotgun sequence |
| 1435 | wastewater metagenome genome assembly, contig: |
| | NODE_787_length_9569_cov_7.467101, whole genome shotgun sequence |
| 1436 | Kamptonema sp. SIO4C4 4C4_NODE_599, whole genome shotgun sequence |
| 1437 | Cyanobacteria bacterium CRU_2_1 NODE_326_length_28779_cov_5.45215, whole |
| | genome shotgun sequence |
| 1438 | Scytonema sp. UIC 10036 c00414_NODE_41 . . . , whole genome shotgun sequence |
| 1439 | Ga0373625_0072956 |
| 1440 | Candidatus Poribacteria bacterium isolate SB0669_bin_10 |
| | NODE_1037_length_12836_cov_8.716219, whole genome shotgun sequence |
| 1441 | TPA_asm: Cyanobacteria bacterium UBA8543 contig_1385, whole genome shotgun |
| | sequence |
| 1442 | Okeania sp. SIO3B5 3B5_NODE_379, whole genome shotgun sequence |
| 1443 | Candidatus Poribacteria bacterium isolate SB0668_bin_36 |
| | NODE_7567_length_5025_cov_7.988531, whole genome shotgun sequence |
| 1444 | wastewater metagenome genome assembly, contig: |
| | NODE_806_length_13733_cov_6.061851, whole genome shotgun sequence |
| 1445 | Desulfitobacterium chlororespirans DSM 11544 genome assembly, contig: |
| | EJ42DRAFT_scaffold00015.15, whole genome shotgun sequence |
| 1446 | Planktothrix prolifica NIVA-CYA 540 genomic scaffold scaffold00001, whole |
| | genome shotgun sequence |
| 1447 | Microcystis aeruginosa 9809 WGS project CAIO01000000 data, contig |
| | AAI_H_2202_526, whole genome shotgun sequence |
| 1448 | Desulfurispora thermophila DSM 16022 B064DRAFT_scaffold_4.5_C, whole |
| | genome shotgun sequence |
| 1449 | Microcystis aeruginosa NIES-843 DNA, complete genome |
| 1450 | Sulfobacillus thermosulfidooxidans strain CBAR-13 Scaffold_1_CBAR13, whole |
| | genome shotgun sequence |
| 1451 | fermentation metagenome genome assembly, contig: |
| | NODE_537_length_51166_cov_18.935787, whole genome shotgun sequence |
| 1452 | Sulfobacillus thermosulfidooxidans DSM 9293 genome assembly, contig: Contig1, |
| | whole genome shotgun sequence |
| 1453 | Desulfitobacterium hafniense TCP-A DeshafDRAFT_Scaffold2.2_C7, whole |
| | genome shotgun sequence |
| 1454 | Sulfobacillus thermosulfidooxidans DSM 9293 genome assembly, contig: Contig1, |
| | whole genome shotgun sequence |
| 1455 | Sulfobacillus thermosulfidooxidans strain CBAR-13 Scaffold_1_CBAR13, whole |
| | genome shotgun sequence |
| 1456 | Sulfobacillus thermosulfidooxidans strain CBAR-13 Scaffold_1_CBAR13, whole |
| | genome shotgun sequence |
| 1457 | Thermicanus aegyptius DSM 12793 genomic scaffold TheaeDRAFT_scaffold1.1, |
| | whole genome shotgun sequence |
| 1458 | Desulfitobacterium hafniense TCP-A genomic scaffold DeshafDRAFT_Scaffold2.2, |
| | whole genome shotgun sequence |
| 1459 | Sulfobacillus thermosulfidooxidans strain CBAR-13 Scaffold_1_CBAR13, whole |
| | genome shotgun sequence |
| 1460 | Desulfitobacterium hafniense TCP-A genomic scaffold DeshafDRAFT_Scaffold2.2, |
| | whole genome shotgun sequence |
| 1461 | Microcystis aeruginosa Ma_MB_F_20061100_S19 S19_183, whole genome shotgun |
| | sequence |
| 1462 | Microcystis aeruginosa PCC 9432 genomic scaffold, AAI_A_2195_scaffold26, |
| | whole genome shotgun sequence |
| 1463 | Planktothrix mougeotii NIVA-CYA 405 genomic scaffold scaffold00001, whole |
| | genome shotgun sequence |
| 1464 | Sulfobacillus thermosulfidooxidans str. Cutipay ALWJ01000037.1, whole genome |
| | shotgun sequence |
| 1465 | Microcystis aeruginosa Ma_QC_C_20070703_M131 M131_147, whole genome |
| | shotgun sequence |
| 1466 | Microcystis aeruginosa CACIAM 03 scaffold134, whole genome shotgun sequence |
| 1467 | Microcystis aeruginosa Ma_MB_F_20061100_S19D S19D_93, whole genome |
| | shotgun sequence |
| 1468 | Microcystis aeruginosa 9432 WGS project CAIH01000000 data, contig |
| | AAI_A_2195_114, whole genome shotgun sequence |
| 1469 | Microcystis aeruginosa SPC777 contig000190, whole genome shotgun sequence |
| 1470 | Microcystis sp. M_QC_C_20170808_M2Col M2Col_152, whole genome shotgun |
| | sequence |
| 1471 | Desulfitobacterium hafniense TCP-A DeshafDRAFT_Scaffold2.2_C7, whole |
| | genome shotgun sequence |
| 1472 | Microcystis aeruginosa NIES-2519 DNA, contig_51, whole genome shotgun |
| | sequence |
| 1473 | Ammonifex sp. isolate SURF_55 Ga0104751_1001767, whole genome shotgun |
| | sequence |
| 1474 | Microcystis aeruginosa L311-01 Ga0187976_10112, whole genome shotgun |
| | sequence |
| 1475 | Microcystis aeruginosa DA14 NODE_19_length_493533_cov_370.53, whole |
| | genome shotgun sequence |
| 1476 | Microcystis aeruginosa PCC 9809 genomic scaffold, AAI_H_2202_scaffold57, |
| | whole genome shotgun sequence |
| 1477 | TPA: hot springs metagenome genome assembly, contig: |
| | NODE_4281_length_5920_cov_6.676352, whole genome shotgun sequence |
| 1478 | Planktothrix agardhii NIVA-CYA 56/3 contig00145, whole genome shotgun |
| | sequence |
| 1479 | TPA_asm: Thermacetogenium sp. UBA4966 UBA4966_contig_280, whole genome |
| | shotgun sequence |
| 1480 | Deltaproteobacteria bacterium GWC2_56_8 gwc2_scaffold_8530, whole genome |
| | shotgun sequence |
| 1481 | Desulfitobacterium chlororespirans DSM 11544 genome assembly, contig: |
| | EJ42DRAFT_scaffold00015.15, whole genome shotgun sequence |
| 1482 | Microcystis aeruginosa KLA2 scaffold66_contigs = 7, whole genome shotgun |
| | sequence |
| 1483 | Desulfitobacterium chlororespirans DSM 11544 genome assembly, contig: |
| | EJ42DRAFT_scaffold00003.3, whole genome shotgun sequence |
| 1484 | fermentation metagenome genome assembly, contig: |
| | NODE_3141_length_10372_cov_57.258796, whole genome shotgun sequence |
| 1485 | Microcystis flos-aquae Ma_QC_C_20070823_S18 S18_108, whole genome shotgun |
| | sequence |
| 1486 | Microcystis aeruginosa KLA2 scaffold82_contigs = 9, whole genome shotgun |
| | sequence |
| 1487 | Microcystis aeruginosa NIES-2519 DNA, contig_51, whole genome shotgun |
| | sequence |
| 1488 | Planktothrix prolifica NIVA-CYA 540 contig00056, whole genome shotgun |
| | sequence |
| 1489 | Microcystis aeruginosa KLA2 scaffold82_contigs = 9, whole genome shotgun |
| | sequence |
| 1490 | Desulfurispora thermophila DSM 16022 B064DRAFT_scaffold_4.5_C, whole |
| | genome shotgun sequence |
| 1491 | Microcystis aeruginosa PCC 9717 genomic scaffold, AAI_B_2196_scaffold19, |
| | whole genome shotgun sequence |
| 1492 | Microcystis aeruginosa KLA2 scaffold355_contigs = 1, whole genome shotgun |
| | sequence |
| 1493 | Microcystis aeruginosa L211-11 Ga0187982_10598, whole genome shotgun |
| | sequence |
| 1494 | Desulfitobacterium chlororespirans DSM 11544 genome assembly, contig: |
| | EJ42DRAFT_scaffold00003.3, whole genome shotgun sequence |
| 1495 | Planktothrix agardhii NIVA-CYA 34 contig00030, whole genome shotgun sequence |
| 1496 | fermentation metagenome genome assembly, contig: |
| | NODE_280_length_68310_cov_4.125529, whole genome shotgun sequence |
| 1497 | Thermicanus aegyptius DSM 12793 TheaeDRAFT_scaffold1.1_C7, whole genome |
| | shotgun sequence |
| 1498 | Microcystis flos-aquae Mf_QC_C_20070823_S10D S10D_188, whole genome |
| | shotgun sequence |
| 1499 | fermentation metagenome genome assembly, contig: |
| | NODE_485_length_43130_cov_47.382426, whole genome shotgun sequence |
| 1500 | Microcystis aeruginosa NIES-88 scaffold11, whole genome shotgun sequence |
| 1501 | Microcystis flos-aquae Mf_QC_C_20070823_S20 S20_174, whole genome shotgun |
| | sequence |
| 1502 | Sulfobacillus thermosulfidooxidans str. Cutipay ALWJ01000037.1, whole genome |
| | shotgun sequence |
| 1503 | Microcystis flos-aquae Mf_QC_C_20070823_S20T S20T_205, whole genome |
| | shotgun sequence |
| 1504 | Microcystis aeruginosa LE3 Ga0066243_1114, whole genome shotgun sequence |
| 1505 | Microcystis aeruginosa KLA2 scaffold355_contigs = 1, whole genome shotgun |
| | sequence |
| 1506 | Microcystis sp. M_QC_C_20170808_M9Col M9Col_321, whole genome shotgun |
| | sequence |
| 1507 | TPA_asm: Syntrophomonas sp. isolate UBA11028 contig_5648, whole genome |
| | shotgun sequence |
| 1508 | Microcystis aeruginosa PCC 7941 genomic scaffold, AAI_D_2198_scaffold23, |
| | whole genome shotgun sequence |
| 1509 | Planktothrix mougeotii NIVA-CYA 405 contig00097, whole genome shotgun |
| | sequence |
| 1510 | Planktothrix agardhii NIVA-CYA 56/3 contig00145, whole genome shotgun |
| | sequence |
| 1511 | Microcystis aeruginosa Ma_OC_LR_19540900_S633 S633_109, whole genome |
| | shotgun sequence |
| 1512 | Microcystis aeruginosa SPC777 contig000190, whole genome shotgun sequence |
| 1513 | Microcystis aeruginosa NIES-2521 DNA, contig_150, whole genome shotgun |
| | sequence |
| 1514 | Microcystis flos-aquae Mf_QC_C_20070823_S10 S10_103, whole genome shotgun |
| | sequence |
| 1515 | Microcystis aeruginosa NIES-88 scaffold11, whole genome shotgun sequence |
| 1516 | Microcystis aeruginosa L311-01 Ga0187976_10112, whole genome shotgun |
| | sequence |
| 1517 | Microcystis aeruginosa KLA2 scaffold66_contigs = 7, whole genome shotgun |
| | sequence |
| 1518 | Planktothrix agardhii NIVA-CYA 34 contig00030, whole genome shotgun sequence |
| 1519 | Microcystis aeruginosa L211-101 Ga0188005_10580, whole genome shotgun |
| | sequence |
| 1520 | fermentation metagenome genome assembly, contig: |
| | NODE_5085_length_8223_cov_2.608839, whole genome shotgun sequence |
| 1521 | Microcystis aeruginosa 9809 WGS project CAIO01000000 data, contig |
| | AAI_H_2202_526, whole genome shotgun sequence |
| 1522 | Microcystis flos-aquae Mf_QC_C_20070823_S20D S20D_61, whole genome |
| | shotgun sequence |
| 1523 | Microcystis aeruginosa FCY-26 FCY-26_01051, whole genome shotgun sequence |

### Protein Modifications

[0103] The IsrBpolypeptide nucleases may comprise one or more modifications. As used herein, the term “modified” with regard to a IsrB polypeptide nuclease generally refers to a IsrB polypeptide nuclease having one or more modifications or mutations (including point mutations, truncations, insertions, deletions, chimeras, fusion proteins, etc.) compared to the wild type counterpart from which it is derived. By derived is meant that the derived enzyme is largely based, in the sense of having a high degree of sequence homology with, a wildtype enzyme, but that it has been mutated (modified) in some way as known in the art or as described herein.

[0104] The modified proteins, e.g., modified IsrB polypeptide nuclease may be catalytically inactive (also referred as dead). As used herein, a catalytically inactive or dead nuclease may have reduced or no nuclease activity compared to a wildtype counterpart nuclease. In some cases, a catalytically inactive or dead nuclease may not have nickase activity. Such a catalytically inactive or dead nuclease may not make a single-strand break on a target polynucleotide, but may still bind or otherwise form complex with the target polynucleotide.

[0105] In an embodiment, the IsrB comprises one or more mutations in the RuvC-II of the polypeptide. In an embodiment, the IsrB polypeptide comprises a mutation of the catalytic RuvC-II residue corresponding to E157 to alanine (E157A) in A. warmingii. In an aspect, the mutation of a catalytic RuvC-II residue abolishes the nickase activity on the non-target DNA strand. In an aspect, the IsrB comprises a mutation corresponding to E157A of A. warmingii, or corresponding to the positions according to consensus sequence numbering relative to A. warmingii. In an embodiment, mutation at the RuvC domain abolishes all dsDNA nucleolytic activity, providing a dead IsrB polypeptide (dIsrB). In one embodiment, the nucleolytic activity that is abolished comprises nickase activity.

[0106] In one embodiment, the modifications of the IsrB polypeptide may or may not cause an altered functionality. By means of example, modifications which do not result in an altered functionality include for instance codon optimization for expression into a particular host, or providing the nuclease with a particular marker (e.g., for visualization). Modifications which may result in altered functionality may also include mutations, including point mutations, insertions, deletions, truncations (including split nucleases), etc., as well as chimeric nucleases (e.g., comprising domains from different orthologues or homologues) or fusion proteins. A chimeric enzyme can comprise a first fragment and a second fragment, and the fragments can be of IsrB polypeptide nuclease orthologs of organisms of a genus or of a species, e.g., the fragments may be from IsrB polypeptide nuclease orthologs of different species. Fusion proteins may without limitation include, for instance, fusions with heterologous domains or functional domains (e.g., localization signals, catalytic domains, etc.). In an embodiment, various different modifications may be combined (e.g., a mutated nuclease which is catalytically inactive and which further is fused to a functional domain, such as for instance to induce DNA methylation or another nucleic acid modification, such as including without limitation, a break (e.g. by a different nuclease (domain)), a mutation, a deletion, an insertion, a replacement, a ligation, a digestion, a break or a recombination). As used herein, “altered functionality” includes without limitation an altered specificity (e.g., altered target recognition, increased (e.g., “enhanced” IsrB polypeptide nuclease) or decreased specificity, or altered TAM recognition), altered activity (e.g., increased or decreased catalytic activity, including catalytically inactive nucleases or nickases), and/or altered stability (e.g., fusions with destabilization domains). Examples of all these modifications are known in the art. It will be understood that a “modified” nuclease as referred to herein, and in particular a “modified” IsrB polypeptide comprises a “modified” nickase activity or system or complex preferably still has the capacity to interact with or bind to the polynucleic acid (e.g., in complex with the ωRNA molecule). Such modified IsrB polypeptide nickasecan be combined with the deaminase protein or active domain thereof as described herein.

[0107] In one embodiment, unmodified IsrB polypeptide nucleases may have cleavage activity. In one embodiment, the IsrB polypeptide nucleases may direct cleavage of one DNA strand at the location of or near a target sequence, such as within the target sequence and/or within the complement of the target sequence or at sequences associated with the target sequence. In one embodiment, the IsrB polypeptide nucleases may direct cleavage of one strand within about 1, 2, 3, 4, 5, 6, 7, 8, 9, 10, 15, 20, 25, 50, 100, 200, 500, or more base pairs or nucleotides from the first or last nucleotide of a target sequence. In one embodiment, the cleavage may be staggered, i.e., generating sticky ends. In one embodiment, the cleavage is a staggered cut with a 5′ overhang. In one embodiment, the cleavage is a staggered cut with a 5′ overhang of 1 to 15 nucleotides, preferably of 4 or 9 nucleotides.

[0108] As a further example, two or more catalytic domains of a IsrB polypeptide nuclease (e.g., RuvC-I, RuvC-II, and RuvC-III subdomains) may be mutated to produce a mutated IsrB polypeptide nuclease substantially lacking all DNA cleavage activity. In one embodiment, the IsrB DNA cleavage activity that is lacking is nickase activity. As described herein, corresponding catalytic domains of a IsrB polypeptide nuclease may also be mutated to produce a mutated IsrB polypeptide nuclease lacking all DNA cleavage activity or having substantially reduced DNA cleavage activity. In one embodiment, the DNA cleavage activity that is lacking is DNA nickase activity. In one embodiment, an IsrB polypeptide nuclease may be considered to substantially lacking all polynucleotide cleavage activity when the polynucleotide cleavage activity of the mutated enzyme is no more than 25%, no more than 10%, no more than 5%, no more than 1%, no more than 0.1%, no more than 0.01% of the nucleic acid cleavage activity of the non-mutated form of the enzyme; an example can be when the nucleic acid cleavage activity of the mutated form is nil or negligible as compared with the non-mutated form. In one embodiment, the IsrB polypeptide nuclease activity that is lacking is DNA nickase activity.

[0109] In an embodiment, the IsrB polypeptide nuclease may comprise one or more modifications resulting in enhanced activity and/or specificity, such as including mutating residues that stabilize the targeted or non-targeted strand. In an embodiment, the altered or modified activity of the engineered IsrB polypeptide nuclease comprises increased targeting efficiency or decreased off-target binding. In an embodiment, the altered activity of the engineered IsrB polypeptide nuclease comprises modified cleavage activity. In an embodiment, the altered activity comprises increased cleavage activity as to the target polynucleotide loci. In an embodiment, the altered activity comprises decreased cleavage activity as to the target polynucleotide loci. In an embodiment, the altered activity comprises decreased cleavage activity as to off-target polynucleotide loci. In an embodiment, the altered or modified activity of the modified nuclease comprises altered helicase kinetics. In an embodiment, the modified nuclease comprises a modification that alters association of the protein with the nucleic acid molecule comprising RNA, or a strand of the target polynucleotide loci, or a strand of off-target polynucleotide loci. In an aspect of the invention, the engineered IsrB polypeptide nuclease comprises a modification that alters formation of the IsrB polypeptide nuclease and related complex. In an embodiment, the altered activity comprises increased cleavage activity as to off-target polynucleotide loci. Accordingly, in an embodiment, there is increased specificity for target polynucleotide loci as compared to off-target polynucleotide loci. In other embodiments, there is reduced specificity for target polynucleotide loci as compared to off-target polynucleotide loci. In an embodiment, the mutations result in decreased off-target effects (e.g., cleavage or binding properties, activity, or kinetics), such as in case for IsrB polypeptide nuclease for instance resulting in a lower tolerance for mismatches between target and ωRNA. Other mutations may lead to increased off-target effects (e.g., cleavage or binding properties, activity, or kinetics). Other mutations may lead to increased or decreased on-target effects (e.g., cleavage or binding properties, activity, or kinetics). In an embodiment, the mutations result in altered (e.g., increased or decreased) helicase activity, association or formation of the functional nuclease complex. In an embodiment, the mutations result in an altered TAM recognition, i.e., a different TAM may be (in addition or in the alternative) be recognized, compared to the unmodified IsrB polypeptide nuclease. Examples mutations include positively charged residues and/or (evolutionary) conserved residues, such as conserved positively charged residues, in order to enhance specificity. In an embodiment, such residues may be mutated to uncharged residues, such as alanine.

### Nuclear Localization Sequences

[0110] In one embodiment, the nucleic acid-guided nuclease is fused to one or more nuclear localization sequences (NLSs), such as about or more than about 1, 2, 3, 4, 5, 6, 7, 8, 9, 10, or more NLSs. In one embodiment, the Nucleic acid-guided nuclease comprises about or more than about 1, 2, 3, 4, 5, 6, 7, 8, 9, 10, or more NLSs at or near the amino-terminus, about or more than about 1, 2, 3, 4, 5, 6, 7, 8, 9, 10, or more NLSs at or near the carboxy-terminus, or a combination of these (e.g. zero or at least one or more NLS at the amino-terminus and zero or at one or more NLS at the carboxy terminus).

[0111] In one embodiment, the IsrBpolypeptide nuclease is fused to one or more nuclear localization sequences (NLSs), such as about or more than about 1, 2, 3, 4, 5, 6, 7, 8, 9, 10, or more NLSs. In one embodiment, the IscB polypeptide nuclease comprises about or more than about 1, 2, 3, 4, 5, 6, 7, 8, 9, 10, or more NLSs at or near the amino-terminus, about or more than about 1, 2, 3, 4, 5, 6, 7, 8, 9, 10, or more NLSs at or near the carboxy-terminus, or a combination of these (e.g. zero or at least one or more NLS at the amino-terminus and zero or at one or more NLS at the carboxy terminus).

[0112] When more than one NLS is present, each may be selected independently of the others, such that a single NLS may be present in more than one copy and/or in combination with one or more other NLSs present in one or more copies. In a preferred embodiment of the invention, the Nucleic acid-guided nuclease comprises at most 6 NLSs. In a preferred embodiment of the invention, the IscB polypeptide nuclease comprises at most 6 NLSs.

[0113] In one embodiment, an NLS is considered near the N- or C-terminus when the nearest amino acid of the NLS is within about 1, 2, 3, 4, 5, 10, 15, 20, 25, 30, 40, 50, or more amino acids along the polypeptide chain from the N- or C-terminus. Non-limiting examples of NLSs include an NLS sequence derived from: the NLS of the SV40 virus large T-antigen, having the amino acid sequence PKKKRKV (SEQ ID NO: 1527); the NLS from nucleoplasmin (e.g. the nucleoplasmin bipartite NLS with the sequence KRPAATKKAGQAKKKK (SEQ ID NO: 1528); the c-myc NLS having the amino acid sequence PAAKRVKLD (SEQ ID NO: 1529) or RQRRNELKRSP (SEQ ID NO: 1530); the hRNPA1 M9 NLS having the sequence NQSSNFGPMKGGNFGGRSSGPYGGGGQYFAKPRNQGGY (SEQ ID NO: 1531); the sequence RMRIZFKNKGKDTAELRRRRVEVSVELRKAKKDEQILKRRNV (SEQ ID NO: 1532) of the IBB domain from importin-alpha; the sequences VSRKRPRP (SEQ ID NO: 1533) and PPKKARED (SEQ ID NO: 1534) of the myoma T protein; the sequence PQPKKKPL (SEQ ID NO: 1535) of human p53; the sequence SALIKKKKKMAP (SEQ ID NO: 1536) of mouse c-abl IV; the sequences DRLRR (SEQ ID NO: 1537) and PKQKKRK (SEQ ID NO: 1538) of the influenza virus NS1; the sequence RKLKKKIKKL (SEQ ID NO: 1539) of the Hepatitis virus delta antigen; the sequence REKKKFLKRR (SEQ ID NO: 1540) of the mouse Mx1 protein; the sequence KRKGDEVDGVDEVAKKKSKK (SEQ ID NO: 1541) of the human poly (ADP-ribose) polymerase; and the sequence RKCLQAGMNLEARKTKK (SEQ ID NO: 1542) of the steroid hormone receptors (human) glucocorticoid.

[0114] In general, the one or more NLSs are of sufficient strength to drive accumulation of the nucleic acid-guided nuclease in a detectable amount in the nucleus of a eukaryotic cell. In general, strength of nuclear localization activity may derive from the number of NLSs in the nucleic acid-guided nuclease, the particular NLS(s) used, or a combination of these factors. Detection of accumulation in the nucleus may be performed by any suitable technique. For example, a detectable marker may be fused to the nucleic acid-guided nuclease, such that location within a cell may be visualized, such as in combination with a means for detecting the location of the nucleus (e.g., a stain specific for the nucleus such as DAPI). Cell nuclei may also be isolated from cells, the contents of which may then be analyzed by any suitable process for detecting protein, such as immunohistochemistry, Western blot, or enzyme activity assay.

[0115] Accumulation in the nucleus may also be determined indirectly, such as by an assay for the effect of complex formation (e.g., assay for DNA cleavage or mutation at the target sequence, or assay for altered gene expression activity affected by complex formation and/or nucleic acid-guided nuclease activity), as compared to a control no exposed to the nucleic acid-guided nuclease or complex, or exposed to a nucleic acid-guided nuclease lacking the one or more NLSs. In an embodiment of the herein described nucleic acid-guided nuclease protein complexes and systems the codon optimized nucleic acid-guided nuclease proteins comprise an NLS attached to the C-terminal of the protein. In an embodiment, other localization tags may be fused to the nucleic acid-guided nuclease, such as without limitation for localizing the nucleic acid-guided nuclease to particular sites in a cell, such as organelles, such as mitochondria, plastids, chloroplast, vesicles, golgi, (nuclear or cellular) membranes, ribosomes, nucleolus, ER, cytoskeleton, vacuoles, centrosome, nucleosome, granules, centrioles, etc.

[0116] In general, the one or more NLSs are of sufficient strength to drive accumulation of the IscB polypeptide nuclease in a detectable amount in the nucleus of a eukaryotic cell. In general, strength of nuclear localization activity may derive from the number of NLSs in the IscB polypeptide nuclease, the particular NLS(s) used, or a combination of these factors. Detection of accumulation in the nucleus may be performed by any suitable technique. For example, a detectable marker may be fused to the IscB polypeptide nuclease, such that location within a cell may be visualized, such as in combination with a means for detecting the location of the nucleus (e.g., a stain specific for the nucleus such as DAPI). Cell nuclei may also be isolated from cells, the contents of which may then be analyzed by any suitable process for detecting protein, such as immunohistochemistry, Western blot, or enzyme activity assay. Accumulation in the nucleus may also be determined indirectly, such as by an assay for the effect of complex formation (e.g., assay for DNA cleavage or mutation at the target sequence, or assay for altered gene expression activity affected by complex formation and/or IsrB polypeptide nuclease activity), as compared to a control not exposed to the IsrB polypeptide nuclease or complex, or exposed to a IsrB polypeptide nuclease lacking the one or more NLSs. In an embodiment of the herein described IsrB polypeptide nuclease protein complexes and systems the codon optimized IsrB polypeptide nuclease proteins comprise an NLS attached to the C-terminal of the protein. In an embodiment, other localization tags may be fused to the IsrB polypeptide nuclease, such as without limitation for localizing the IsrB polypeptide nuclease to particular sites in a cell, such as organelles, such as mitochondria, plastids, chloroplast, vesicles, golgi, (nuclear or cellular) membranes, ribosomes, nucleolus, ER, cytoskeleton, vacuoles, centrosome, nucleosome, granules, centrioles, etc.

[0117] In an embodiment of the invention, at least one nuclear localization signal (NLS) is attached to the nucleic acid sequences encoding the IsrB polypeptide nuclease. In preferred embodiments at least one or more C-terminal or N-terminal NLSs are attached (and hence nucleic acid molecule(s) coding for the IsrB polypeptide nuclease can include coding for NLS(s) so that the expressed product has the NLS(s) attached or connected). In a preferred embodiment a C-terminal NLS is attached for optimal expression and nuclear targeting in eukaryotic cells, preferably human cells. The invention also encompasses methods for delivering multiple nucleic acid components, wherein each nucleic acid component is specific for a different target locus of interest thereby modifying multiple target loci of interest. The nucleic acid component of the complex may comprise one or more protein-binding RNA aptamers. The one or more aptamers may be capable of binding a bacteriophage coat protein.

### IsrBs Modified With Heterologous Functional Domains

[0118] The IsrB polypeptide (including variants such as a catalytically inactive form) may be associated with one or more functional domains (e.g., via fusion protein or suitable linkers). In an embodiment, the IsrB polypeptide nuclease, or an ortholog or homolog thereof, may be used as a generic nucleic acid binding protein with fusion to or being operably linked to one or more functional domains. In one example, the functional domain is a deaminase. In another example, the functional domain is a transposase. In another example, the functional domain is a reverse transcriptase. In some cases, a functional domain may be associate with (e.g., fuse to) the IsrBpolypeptide nuclease. In some cases, a functional domain may be a protein different from the IsrBpolypeptide nuclease. In such cases, a functional domain and the IsrB polypeptide nuclease may form a protein complex.

[0119] It is also envisaged that the IsrB complex may be associated with two or more functional domains. For example, there may be two or more functional domains associated with the IsrB polypeptide, or there may be two or more functional domains associated with the ωRNA (via one or more adaptor proteins), or there may be one or more functional domains associated with the IsrB polypeptide and one or more functional domains associated with the ωRNA (via one or more adaptor proteins).

[0120] In one embodiment, the IsrB polypeptide nuclease is associated with one or more functional domains. The association can be by direct linkage of the effector protein to the functional domain, or by association with the ωRNA. In a non-limiting example, the ωRNA comprises an added or inserted sequence that can be associated with a functional domain of interest, including, for example, an aptamer or a nucleotide that binds to a nucleic acid binding adapter protein. The functional domain may be a functional heterologous domain.

[0121] In one embodiment, the invention also provides for the one or more heterologous functional domains to have one or more of the following activities: methylase activity, demethylase activity, transcription activation activity, transcription repression activity, transcription release factor activity, histone modification activity, nuclease activity, single-strand RNA cleavage activity, double-strand RNA cleavage activity, single-strand DNA cleavage activity, double-strand DNA cleavage activity and nucleic acid binding activity. At least one or more heterologous functional domains may be at or near the amino-terminus of the effector protein and/or wherein at least one or more heterologous functional domains is at or near the carboxy-terminus of the effector protein. The one or more heterologous functional domains may be fused to the effector protein. The one or more heterologous functional domains may be tethered to the effector protein. The one or more heterologous functional domains may be linked to the effector protein by a linker moiety.

[0122] In an embodiment, the IsrB polypeptide nuclease or an ortholog or homolog thereof, may be used as a generic nucleic acid binding protein with fusion to or being operably linked to a functional domain. Exemplary functional domains may include but are not limited to translational initiator, translational activator, translational repressor, nucleases, in particular ribonucleases, a spliceosome, beads, a light inducible/controllable domain or a chemically inducible/controllable domain. In an embodiment, the one or more functional domains are controllable, e.g., inducible.

[0123] In one embodiment, one or more functional domains are associated with a IsrB polypeptide nuclease via an adaptor protein, for example as used with the modified guides of Konnerman et al. (Nature 517, 583-588, 29 Jan. 2015).

[0124] In one embodiment, the one or more functional domains is attached to the adaptor protein so that upon binding of the IsrB complex to the target polynucleotide, the functional domain is in a spatial orientation allowing for the functional domain to function in its attributed function.

[0125] In one embodiment, one or more functional domains are associated with a dead ωRNA molecule. In one embodiment, a ωRNA complex with active IsrB polypeptide nuclease directs gene regulation by a functional domain at on gene locus while an ωRNA directs DNA cleavage by the active IsrB polypeptide nuclease at another locus. In one embodiment, ωRNA are selected to maximize selectivity of regulation for a gene locus of interest compared to off-target regulation. In one embodiment, ωRNA are selected to maximize target gene regulation and minimize target cleavage.

[0126] For the purposes of the following discussion, reference to a functional domain could be a functional domain associated with the IsrB polypeptide nuclease or a functional domain associated with the adaptor protein. In one embodiment, the one or more functional domains is attached to the adaptor protein so that upon binding of the IsrB polypeptide nuclease to the hRNA molecule and target, the functional domain is in a spatial orientation allowing for the functional domain to function in its attributed function.

[0127] In the practice of the invention, loops of the ωRNA may be extended, without colliding with the IsrB polypeptide nuclease by the insertion of distinct RNA loop(s) or distinct sequence(s) that may recruit adaptor proteins that can bind to the distinct RNA loop(s) or distinct sequence(s). The adaptor proteins may include but are not limited to orthogonal RNA-binding protein/aptamer combinations that exist within the diversity of bacteriophage coat proteins. A list of such coat proteins includes, but is not limited to: Qβ, F2, GA, fr, JP501, M12, R17, BZ13, JP34, JP500, KU1, M11, MX1, TW18, VK, SP, FI, ID2, NL95, TW19, AP205, ϕCb5, ϕCb8r, ϕCb12r, ϕCb23r, 7s and PRR1. These adaptor proteins or orthogonal RNA binding proteins can further recruit effector proteins or fusions which comprise one or more functional domains.

[0128] Examples of functional domains include deaminase domain, transposase domain (e.g. helitron), reverse transcriptase domain, integrase domain, recombinase domain, resolvase domain, invertase domain, protease domain, DNA methyltransferase domain, DNA hydroxylmethylase domain, RNA polymerase domains, DNA demethylase domain, histone acetylase domain, histone deacetylases domain, nuclease domain (e.g. VirD2 domain), repressor domain, activator domain, nuclear-localization signal domains, transcription-regulatory protein (or transcription complex recruiting) domain, cellular uptake activity associated domain, nucleic acid binding domain, antibody presentation domain, histone modifying enzymes, recruiter of histone modifying enzymes; inhibitor of histone modifying enzymes, histone methyltransferase, histone demethylase, histone kinase, histone phosphatase, histone ribosylase, histone deribosylase, histone ubiquitinase, histone deubiquitinase, histone biotinase and histone tail protease. In some preferred embodiments, the functional domain is a transcriptional activation domain, such as, without limitation, VP64, p65, MyoD1, HSF1, RTA, SET7/9 or a histone acetyltransferase. In one embodiment, the functional domain is a transcription repression domain, preferably KRAB. In one embodiment, the transcription repression domain is SID, or concatemers of SID (e.g. SID4X). In one embodiment, the functional domain is an epigenetic modifying domain, such that an epigenetic modifying enzyme is provided. In one embodiment, the functional domain is an activation domain, which may be the P65 activation domain.

[0129] In some examples, the IsrB polypeptide nuclease is associated with a ligase or functional fragment thereof. The ligase may ligate a single-strand break (a nick) generated by the IsrB polypeptide nuclease. In certain examples, the IsrB polypeptide nuclease is associated with a reverse transcriptase or functional fragment thereof.

[0130] In one embodiment, the one or more functional domains is a transcriptional repressor domain. In one embodiment, the transcriptional repressor domain is a KRAB domain. In one embodiment, the transcriptional repressor domain is a NuE domain, NcoR domain, SID domain or a SID4X domain.

[0131] In one embodiment, the one or more functional domains have one or more activities, e.g., one or more of transposase activity, methylase activity, demethylase activity, translation activation activity, translation repression activity, transcription activation activity, transcription repression activity, transcription release factor activity, chromatin modifying or remodeling activity, histone modification activity, nuclease activity, single-strand RNA cleavage activity, double-strand RNA cleavage activity, single-strand DNA cleavage activity, double-strand DNA cleavage activity, nucleic acid binding activity, and detectable activity.

[0132] Histone modifying domains are also preferred in one embodiment. Exemplary histone modifying domains are discussed below. Transposase domains, HR (Homologous Recombination) machinery domains, recombinase domains, and/or integrase domains are also preferred as the present functional domains. In one embodiment, DNA integration activity includes HR machinery domains, integrase domains, recombinase domains and/or transposase domains.

[0133] In one embodiment, the DNA cleavage activity is due to a nuclease. In one embodiment, the nuclease comprises a Fok1 nuclease. See, “Dimeric CRISPR RNA-guided FokI nucleases for highly specific genome editing”, Shengdar Q. Tsai, Nicolas Wyvekens, Cyd Khayter, Jennifer A. Foden, Vishal Thapar, Deepak Reyon, Mathew J. Goodwin, Martin J. Aryee, J. Keith Joung Nature Biotechnology 32 (6): 569-77 (2014), relates to dimeric RNA-guided FokI Nucleases that recognize extended sequences and can edit endogenous genes with high efficiencies in human cells.

[0134] In one embodiment, the one or more functional domains is attached to the IsrB polypeptide nuclease so that upon binding to the sgRNA and target the functional domain is in a spatial orientation allowing for the functional domain to function in its attributed function.

[0135] In one embodiment, the IsrB polypeptide nuclease comprise one or more heterologous functional domains. As used herein, a heterologous functional domain is a polypeptide that is not derived from the same species as the IsrB polypeptide nuclease. For example, a heterologous functional domain of a IsrB polypeptide nuclease derived from species A is a polypeptide derived from a species different from species A, or an artificial polypeptide. The one or more heterologous functional domains may comprise one or more nuclear localization signal (NLS) domains. The one or more heterologous functional domains may comprise at least two or more NLSs. The one or more heterologous functional domains may comprise one or more transcriptional activation domains. A transcriptional activation domain may comprise VP64. The one or more heterologous functional domains may comprise one or more transcriptional repression domains. A transcriptional repression domain may comprise a KRAB domain or a SID domain. The one or more heterologous functional domain may comprise one or more nuclease domains. The one or more nuclease domains may comprise Fok1.

[0136] Functional domains may be used to regulate transcription, e.g., transcriptional repression. Transcriptional repression is often mediated by chromatin modifying enzymes such as histone methyltransferases (HMTs) and deacetylases (HDACs). Repressive histone effector domains are known and an exemplary list is provided below. In the exemplary table, preference was given to proteins and functional truncations of small size to facilitate efficient viral packaging (for instance via AAV). In general, however, the domains may include HDACs, histone methyltransferases (HMTs), and histone acetyltransferase (HAT) inhibitors, as well as HDAC and HMT recruiting proteins. The functional domain may be or include, In one embodiment, HDAC Effector Domains, HDAC Recruiter Effector Domains, Histone Methyltransferase (HMT) Effector Domains, Histone Methyltransferase (HMT) Recruiter Effector Domains, or Histone Acetyltransferase Inhibitor Effector Domains.

[0137] In one embodiment, the functional domain may be a Methyltransferase (HMT) Effector Domain. Preferred examples include NUE, vSET, EHMT2/G9A, SUV39H1, dim-5, KYP, SUVR4, SET4, SET1, SETD8, and TgSET8. NUE is exemplified in the present Examples and, although preferred, it is envisaged that others in the class will also be useful.

[0138] In one embodiment, the functional domain may be a Histone Methyltransferase (HMT) Recruiter Effector Domain. Preferred examples include Hp1a, PHF19, and NIPP1.

[0139] In one embodiment, the functional domain may be Histone Acetyltransferase Inhibitor Effector Domain. Preferred examples include SET/TAF-1β.

[0140] In some cases, the target endogenous (regulatory) control elements (such as enhancers and silencers) in addition to a promoter or promoter-proximal elements. Thus, the invention can also be used to target endogenous control elements (including enhancers and silencers) in addition to targeting of the promoter. These control elements can be located upstream and downstream of the transcriptional start site (TSS), starting from 200 bp from the TSS to 100 kb away. Targeting of known control elements can be used to activate or repress the gene of interest. In some cases, a single control element can influence the transcription of multiple target genes. Targeting of a single control element could therefore be used to control the transcription of multiple genes simultaneously.

[0141] Targeting of putative control elements on the other hand (e.g. by tiling the region of the putative control element as well as 200 bp up to 100 kB around the element) can be used as a means to verify such elements (by measuring the transcription of the gene of interest) or to detect novel control elements (e.g. by tiling 100 kb upstream and downstream of the TSS of the gene of interest). In addition, targeting of putative control elements can be useful in the context of understanding genetic causes of disease. Many mutations and common SNP variants associated with disease phenotypes are located outside coding regions. Targeting of such regions with either the activation or repression systems described herein can be followed by readout of transcription of either a) a set of putative targets (e.g. a set of genes located in closest proximity to the control element) or b) whole-transcriptome readout by e.g. RNAseq or microarray. This would allow for the identification of likely candidate genes involved in the disease phenotype. Such candidate genes could be useful as novel drug targets.

[0142] In one embodiment is for the one or more functional domains to comprise an acetyltransferase, preferably a histone acetyltransferase. These are useful in the field of epigenomics, for example in methods of interrogating the epigenome. Methods of interrogating the epigenome may include, for example, targeting epigenomic sequences. Targeting epigenomic sequences may include the hRNA being directed to an epigenomic target sequence. Epigenomic target sequence may include, in one embodiment, include a promoter, silencer or an enhancer sequence.

[0143] The functional domains may be acetyltransferases domains. Examples of acetyltransferases are known but may include, In one embodiment, histone acetyltransferases. In one embodiment, the histone acetyltransferase may comprise the catalytic core of the human acetyltransferase p300 (Gerbasch & Reddy, Nature Biotech 6th April 2015).

### Linkers

[0144] In an embodiment of the invention, at least one nuclear localization signal (NLS) is attached to the nucleic acid sequences encoding the nucleic acid-guided nuclease or the IscB polypeptide nuclease. In preferred embodiments at least one or more C-terminal or N-terminal NLSs are attached (and hence nucleic acid molecule(s) coding for the nucleic acid-guided nuclease or IsrB polypeptide nuclease can include coding for NLS(s) so that the expressed product has the NLS(s) attached or connected). In a preferred embodiment a C-terminal NLS is attached for optimal expression and nuclear targeting in eukaryotic cells, preferably human cells. The invention also encompasses methods for delivering multiple nucleic acid components, wherein each nucleic acid component is specific for a different target locus of interest thereby modifying multiple target loci of interest. The nucleic acid component of the complex may comprise one or more protein-binding RNA aptamers. The one or more aptamers may be capable of binding a bacteriophage coat protein.

[0145] In some preferred embodiments, the functional domain is linked to a nucleic acid-guided nuclease (e.g., an active or a dead nucleic acid-guided nuclease) to target and activate epigenomic sequences such as promoters or enhancers. One or more guides directed to such promoters or enhancers may also be provided to direct the binding of the nucleic acid-guided nuclease to such promoters or enhancers.

[0146] In some preferred embodiments, the functional domain is linked to a IsrB polypeptide nuclease (e.g., an active or a dead IsrB polypeptide nuclease) to target and activate epigenomic sequences such as promoters or enhancers. One or more guides directed to such promoters or enhancers may also be provided to direct the binding of the IsrB polypeptide nuclease to such promoters or enhancers.

[0147] The term “associated with” is used here in relation to the association of the functional domain to the IscB polypeptide nuclease protein, nucleic acid-guided nuclease, or the adaptor protein. It is used in respect of how one molecule ‘associates’ with respect to another, for example between an adaptor protein and a functional domain, between the IscB polypeptide nuclease protein and a functional domain, or between the nucleic acid guided nuclease protein and a functional domain. In the case of such protein-protein interactions, this association may be viewed in terms of recognition in the way an antibody recognizes an epitope. Alternatively, one protein may be associated with another protein via a fusion of the two, for instance one subunit being fused to another subunit. Fusion typically occurs by addition of the amino acid sequence of one to that of the other, for instance via splicing together of the nucleotide sequences that encode each protein or subunit. Alternatively, this may essentially be viewed as binding between two molecules or direct linkage, such as a fusion protein. In any event, the fusion protein may include a linker between the two subunits of interest (i.e. between the enzyme and the functional domain or between the adaptor protein and the functional domain). Thus, in one embodiment, the IsrB polypeptide nuclease protein, nucleic acid-guided nuclease, or adaptor protein is associated with a functional domain by binding thereto. In other embodiments, the IscB polypeptide nuclease, nucleic acid-guided nuclease, or adaptor protein is associated with a functional domain because the two are fused together, optionally via an intermediate linker.

[0148] The term “linker” as used in reference to a fusion protein refers to a molecule which joins the proteins to form a fusion protein. Generally, such molecules have no specific biological activity other than to join or to preserve some minimum distance or other spatial relationship between the proteins. However, in an embodiment, the linker may be selected to influence some property of the linker and/or the fusion protein such as the folding, net charge, or hydrophobicity of the linker.

[0149] Suitable linkers for use in the methods of the present invention are well known to those of skill in the art and include, but are not limited to, straight or branched-chain carbon linkers, heterocyclic carbon linkers, or peptide linkers. However, as used herein the linker may also be a covalent bond (carbon-carbon bond or carbon-heteroatom bond).

[0150] In one embodiment, the linker is used to separate the IsrB polypeptide nuclease and the nucleotide deaminase by a distance sufficient to ensure that each protein retains its required functional property. In one embodiment, the linker is used to separate the nucleic acid-guided nuclease and the nucleotide deaminase by a distance sufficient to ensure that each protein retains its required functional property.

[0151] For example, GlySer linkers GGS, GGGS (SEQ ID NO: 1543) or GSG can be used. GGS, GSG, GGGS (SEQ ID NO: 1543) or GGGGS (SEQ ID NO: 1544) linkers can be used in repeats of 3 (such as (GGS)₃, (SEQ ID NO: 1545) (GGGGS)₃) (SEQ ID NO: 1546) or 5, 6, 7, 9 or even 12 or more, to provide suitable lengths. In some cases, the linker may be (GGGGS)₃₋₁₅, For example, in some cases, the linker may be (GGGGS)₃₋₁₁, e.g., GGGGS (SEQ ID NO: 1544), (GGGGS)₂ (SEQ ID NO: 1547), (GGGGS); (SEQ ID NO: 1546), (GGGGS)+ (SEQ ID NO: 1548), (GGGGS)₅ (SEQ ID NO: 1549), (GGGGS)₆ (SEQ ID NO: 1550), (GGGGS)₇ (SEQ ID NO: 1551), (GGGGS): (SEQ ID NO: 1552), (GGGGS)₉ (SEQ ID NO: 1553), (GGGGS)₁₀ (SEQ ID NO: 1554), or (GGGGS)₁₁ (SEQ ID NO: 1555).

[0152] In one embodiment, linkers such as (GGGGS); (SEQ ID NO: 1546) are preferably used herein. (GGGGS)₆ (SEQ ID NO: 1550), (GGGGS)₉ (SEQ ID NO: 1553) or (GGGGS)₁₂ (SEQ ID NO: 1556) may preferably be used as alternatives. Other preferred alternatives are (GGGGS) | (SEQ ID NO: 1544), (GGGGS)₂ (SEQ ID NO: 1547), (GGGGS)+ (SEQ ID NO: 1548), (GGGGS)₅ (SEQ ID NO: 1549), (GGGGS)₇ (SEQ ID NO: 1551), (GGGGS)₈ (SEQ ID NO: 1552), (GGGGS)₁₀ (SEQ ID NO: 1554), or (GGGGS)₁₁ (SEQ ID NO: 1555). In yet a further embodiment, LEPGEKPYKCPECGKSFSQSGALTRHQRTHTR (SEQ ID NO: 1557) is used as a linker. In yet an additional embodiment, the linker is an XTEN linker. In one embodiment, the IsrB polypeptide nuclease or the nucleic acid-guided nuclease is linked to the deaminase protein or its catalytic by domain means of an LEPGEKPYKCPECGKSFSQSGALTRHQRTHTR (SEQ ID NO: 1557) linker. In further one embodiment, IsrB polypeptide nuclease is linked C-terminally to the N-terminus of a deaminase protein or its catalytic by domain means of an LEPGEKPYKCPECGKSFSQSGALTRHQRTHTR (SEQ ID NO: 1557) linker. In addition, N- and C-terminal NLSs can also function as linker (e.g., PKKKRKVEASSPKKRKVEAS (SEQ ID NO: 1558)).

TABLE 2
Examples of linkers used in the invention are
shown.

| | |
|---|---|
| GGS | GGTGGTAGT |
| GGSx3 (9) | GGTGGTAGTGGAGGGAGCGGCGGTTCA |
| (SEQ ID | (SEQ ID NO: 1560) |
| NO: 1545) | |
| GGSx7 (21) | ggtggaggaggctctggtggaggcggtagcggaggcgg |
| (SEQ ID | agggtcgGGTGGTAGTGGAGGGAGCGGCGGTTCA |
| NO: 1559) | (SEQ ID NO: 1561) |
| XTEN | TCGGGATCTGAGACGCCTGGGACCTCGGAATCGGCTAC |
| | GCCCGAAAGT (SEQ ID NO: 1562) |
| Z-EGFR_ | Gtggataacaaatttaacaaagaaatgtgggcggcgtg |
| Short | ggaagaaattcgtaacctgccgaacctgaacggctggc |
| | agatgaccgcgtttattgcgagcctggtggatgatccg |
| | agccagagcgcgaacctgctggcggaagcgaaaaaact |
| | gaacgatgcgcaggcgccgaaaaccggcggtggttctg |
| | gt (SEQ ID NO: 1563) |
| GSAT | Ggtggttctgccggtggctccggttctggctccagcgg |
| | tggcagctctggtgcgtccggcacgggtactgcgggtg |
| | gcactggcagcggttccggtactggctctggc |
| | (SEQ ID NO: 1564) |

[0153] Linkers may be used between the hRNA molecules and the functional domain (activator or repressor), or between the IscB polypeptide nuclease and the functional domain. In an embodiment, linkers may be used between the guide molecules and the functional domain (e.g. activator or repressor), or between the Cas IsrB polypeptide nuclease and the functional domain. The linkers may be used to engineer appropriate amounts of “mechanical flexibility”.

[0154] In an embodiment, the one or more functional domains are controllable, e.g., inducible.

### ωRNAs

[0155] The systems herein may further comprise one or more ωRNA molecules, which are referred to herein interchangeably as ωRNA. The ωRNA complex can comprise a guide sequence and a scaffold that interacts with the IsrB polypeptide. An ωRNA molecule may form a complex with IsrB polypeptide nuclease or IsrB polypeptide, and direct sequence-specific binding of the complex to a target sequence on a target polypeptide.

[0156] In certain example embodiments, the ωRNA molecule is a single molecule comprising a scaffold sequence and a spacer sequence. In certain example embodiments, the spacer is 5′ of the scaffold sequence. In certain example embodiments, the ωRNA molecule may further comprise a conserved nucleic acid sequence between the scaffold and spacer portions. As used herein, “target sequence” refers to a sequence to which a guide sequence is designed to have complementarity, where hybridization between a target sequence and a guide RNA promotes the formation of a DNA or RNA-targeting complex. Full complementarity is not necessarily required, provided there is sufficient complementarity to cause hybridization and promote formation of a nucleic acid-targeting complex. A target sequence may comprise RNA polynucleotides. In one embodiment, a target sequence is located in the nucleus or cytoplasm of a cell. In one embodiment, the target sequence may be within an organelle of a eukaryotic cell, for example, mitochondrion or chloroplast. A sequence or template that may be used for recombination into the targeted locus comprising the target sequences is referred to as an “editing template” or “editing sequence”. In aspects of the invention, an exogenous template may be referred to as an editing template. In an aspect the recombination is homologous recombination.

[0157] In certain example embodiments, the ωRNA scaffold comprises a spacer sequence and a conserved nucleotide sequence. The ωRNA scaffold typically comprises conserved regions, with the scaffold comprising 30, 31, 32, 33, 34, 35, 36, 37, 38, 39 40, 41, 42, 43, 44, 45, 46, 47 48, 49, 50, 51, 52, 53, 54, 55, 56, 57, 58, 59, 60, 61, 62, 63, 64, 65, 66, 67, 68, 69, 70, 71, 72, 73, 74, 75, 76, 77, 78, 79, 80, 81, 82, 83, 84, 85, 86, 87, 88, 89, 90, 91, 92, 93, 94, 95, 96, 97, 98, 99, 100, 105, 115, 125, 135, 145, 155, 165, 175, 185, 195, 205, 215, 225, 235, 245, 255, 265, 275, 285, 295, 305, 315, 325, 335, 345, or 355 or more nt. In an aspect, the ωRNA scaffold comprises one conserved nucleotide sequence. In embodiments, the conserved nucleotide sequence is on or near a 5′ end of the scaffold. In embodiments, the scaffold may comprise a short 3-4 base pair nexus, a conserved nexus hairpin and a large multi-stem loop region that may consist of two interconnected multi-stem loops. In an aspect, an IsrB associated scaffold may comprise a spacer, which can be re-programmed to direct site-specific binding to a target sequence of a target polynucleotide. The spacer may also be referred to herein as part of the ωRNA scaffold or as gRNA, and may comprise an engineered heterologous sequence.

[0158] In an embodiment, the spacer length of the ωRNA is from 10 to 150 nt. In an embodiment, the spacer length of the guide RNA is at least 15 nucleotides. In an embodiment, the spacer length is from 15 to 17 nt, e.g., 15, 16, or 17 nt, from 17 to 20 nt, e.g., 17, 18, 19, or 20 nt, from 20 to 24 nt, e.g., 20, 21, 22, 23, or 24 nt, from 23 to 25 nt, e.g., 23, 24, or 25 nt, from 24 to 27 nt, e.g., 24, 25, 26, or 27 nt, from 27 to 30 nt, e.g., 27, 28, 29, or 30 nt, from 30 to 35 nt, e.g., 30, 31, 32, 33, 34, or 35 nt, or 35 nt or longer. In certain example embodiment, the guide sequence is 15, 16, 17, 18, 19, 20, 21, 22, 23, 24, 25, 26, 27, 28, 29, 30, 31, 32, 33, 34, 35, 36, 37, 38, 39 40, 41, 42, 43, 44, 45, 46, 47 48, 49, 50, 51, 52, 53, 54, 55, 56, 57, 58, 59, 60, 61, 62, 63, 64, 65, 66, 67, 68, 69, 70, 71, 72, 73, 74, 75, 76, 77, 78, 79, 80, 81, 82, 83, 84, 85, 86, 87, 88, 89, 90, 91, 92, 93, 94, 95, 96, 97, 98, 99, 100, 101, 102, 103, 104, 105, 106, 107, 108, 109, 110, 111, 112, 113, 114, 115, 116, 117, 118, 119, 120, 121, 122, 123, 124, 125, 126, 127, 128, 129, 130, 131, 132, 133, 134, 135, 136, 17, 138, 19, 140, 141, 142, 143, 144, 145, 146, 147, 148, 149 or 150 nt.

[0159] In an embodiment, the ωRNA spacer length is from 15 to 50 nt. In an embodiment, the spacer length of the ωRNA is at least 15 nucleotides. In an embodiment, the spacer length is from 15 to 50 nt, e.g., 15, 16, or 17 nt, from 17 to 20 nt, e.g., 17, 18, 19, or 20 nt, from 20 to 24 nt, e.g., 20, 21, 22, 23, or 24 nt, from 23 to 25 nt, e.g., 23, 24, or 25 nt, from 24 to 27 nt, e.g., 24, 25, 26, or 27 nt, from 27 to 30 nt, e.g., 27, 28, 29, or 30 nt, from 30 to 35 nt, e.g., 30, 31, 32, 33, 34, or 35 nt, or 35 nt, from 34 to 40 nt, e.g., 34, 35, 36, 37, 38, 39, 40, from 35 to 39, from 36 to 38 nt long, about 37 nt, or longer.

[0160] In one embodiment, the sequence of the ωRNA molecule is selected to reduce the degree secondary structure within the @ RNA molecule. In one embodiment, about or less than about 75%, 50%, 40%, 30%, 25%, 20%, 15%, 10%, 5%, 1%, or fewer of the nucleotides of the nucleic acid-targeting ωRNA participate in self-complementary base pairing when optimally folded. Optimal folding may be determined by any suitable polynucleotide folding algorithm. Some programs are based on calculating the minimal Gibbs free energy. An example of one such algorithm is mFold, as described by Zuker and Stiegler (Nucleic Acids Res. 9 (1981), 133-148). Another example of a folding algorithm is the online webserver RNAfold, developed at Institute for Theoretical Chemistry at the University of Vienna, using the centroid structure prediction algorithm (see e.g., A. R. Gruber et al., 2008, Cell 106 (1): 23-24; and PA Carr and GM Church, 2009, Nature Biotechnology 27 (12): 1151-62).

[0161] As used herein, a heterologous ωRNA molecule is an ωRNA molecule that is not derived from the same species as the IsrB polypeptide, or comprises a portion of the molecule, e.g., spacer, that is not derived from the same species as the IsrB polypeptidenuclease, e.g. IsrB protein. For example, a heterologous ωRNA molecule of a IsrB polypeptide nuclease derived from species A comprises a polynucleotide derived from a species different from species A, or an artificial polynucleotide.

[0162] In a particular embodiment, the ωRNA comprises a guide sequence linked to a conserved nucleotide sequence, wherein the conserved nucleotide sequence may comprise one or more stem loops or optimized secondary structures. In an embodiment, the conserved nucleotide sequence has a minimum length of 16 nts and a single stem loop. In further embodiments the conserved nucleotide sequence has a length longer than 16 nts, preferably more than 17 nts, and has more than one stem loops or optimized secondary structures. In one embodiment, the guide sequence may be linked to all or part of the natural conserved nucleotide sequence. In one embodiment, certain aspects of the guide architecture can be modified, for example by addition, subtraction, or substitution of features, whereas certain other aspects of guide architecture are maintained. Preferred locations for engineered guide modifications, including but not limited to insertions, deletions, and substitutions include guide termini and regions of the guide that are exposed when complexed with IsrB polypeptide nuclease and/or target, for example the tetraloop and/or loop2.

[0163] In one embodiment, a loop in the guide RNA is provided. This may be a stem loop or a tetra loop. The loop is preferably GAAA, but it is not limited to this sequence or indeed to being only 4 bp in length. Indeed, preferred loop forming sequences for use in hairpin structures are four nucleotides in length, and most preferably have the sequence GAAA. However, longer or shorter loop sequences may be used, as may alternative sequences. The sequences preferably include a nucleotide triplet (for example, AAA), and an additional nucleotide (for example C or G). Examples of loop forming sequences include CAAA and AAAG.

[0164] In one embodiment, the ωRNA forms a stemloop with a separate non-covalently linked sequence, which can be DNA or RNA. In an embodiment, the sequences forming the guide are first synthesized using the standard phosphoramidite synthetic protocol (Herdewijn, P., ed., Methods in Molecular Biology Col 288, Oligonucleotide Synthesis: Methods and Applications, Humana Press, New Jersey (2012)). In one embodiment, these sequences can be functionalized to contain an appropriate functional group for ligation using the standard protocol known in the art (Hermanson, G. T., Bioconjugate Techniques, Academic Press (2013). Examples of functional groups include, but are not limited to, hydroxyl, amine, carboxylic acid, carboxylic acid halide, carboxylic acid active ester, aldehyde, carbonyl, chlorocarbonyl, imidazolylcarbonyl, hydrozide, semicarbazide, thio semicarbazide, thiol, maleimide, haloalkyl, sulfonyl, ally, propargyl, diene, alkyne, and azide. Once this sequence is functionalized, a covalent chemical bond or linkage can be formed between this sequence and the conserved nucleotide sequence. Examples of chemical bonds include, but are not limited to, those based on carbamates, ethers, esters, amides, imines, amidines, aminotrizines, hydrozone, disulfides, thioethers, thioesters, phosphorothioates, phosphorodithioates, sulfonamides, sulfonates, fulfones, sulfoxides, ureas, thioureas, hydrazide, oxime, triazole, photolabile linkages, C—C bond forming groups such as Diels-Alder cyclo-addition pairs or ring-closing metathesis pairs, and Michael reaction pairs.

[0165] In one embodiment, these stem-loop forming sequences can be chemically synthesized. In one embodiment, the chemical synthesis uses automated, solid-phase oligonucleotide synthesis machines with 2′-acetoxyethyl orthoester (2′-ACE) (Scaringe et al., J. Am. Chem. Soc. (1998) 120:11820-11821; Scaringe, Methods Enzymol. (2000) 317:3-18) or 2′-thionocarbamate (2′-TC) chemistry (Dellinger et al., J. Am. Chem. Soc. (2011) 133:11540-11546; Hendel et al., Nat. Biotechnol. (2015) 33:985-989).

[0166] The repeat: anti-repeat duplex will be apparent from the secondary structure of the ωRNA. It may be typically a first complimentary stretch after (in 5′ to 3′ direction) the poly U tract and before the tetraloop; and a second complimentary stretch after (in 5′ to 3′ direction) the tetraloop and before the polyA tract. The first complimentary stretch (the “repeat”) is complimentary to the second complimentary stretch (the “anti-repeat”). As such, they Watson-Crick base pair to form a duplex of dsRNA when folded back on one another. As such, the anti-repeat sequence is the complimentary sequence of the repeat and in terms to A-U or C-G base pairing, but also in terms of the fact that the anti-repeat is in the reverse orientation due to the tetraloop.

[0167] As used herein, the term “spacer” may also be referred to as a “guide sequence.” In one embodiment, the degree of complementarity of the guide quence to a given target sequence, when optimally aligned using a suitable alignment algorithm, is about or more than 50%, 60%, 75%, 80%, 85%, 90%, 95%, 97.5%, 99%, or more. In certain example embodiments, the ωRNA molecule comprises a guide sequence that may be designed to have at least one mismatch with the target sequence, such that a RNA duplex formed between the sequence and the target sequence. Accordingly, the degree of complementarity is less than 99%. For instance, where the guide sequence consists of 24 nucleotides, the degree of complementarity is more particularly about 96% or less. In one embodiment, the guide sequence is designed to have a stretch of two or more adjacent mismatching nucleotides, such that the degree of complementarity over the entire sequence is further reduced. For instance, where the guide sequence consists of 24 nucleotides, the degree of complementarity is more particularly about 96% or less, more particularly, about 92% or less, more particularly about 88% or less, more particularly about 84% or less, more particularly about 80% or less, more particularly about 76% or less, more particularly about 72% or less, depending on whether the stretch of two or more mismatching nucleotides encompasses 2, 3, 4, 5, 6 or 7 nucleotides, etc. In one embodiment, aside from the stretch of one or more mismatching nucleotides, the degree of complementarity, when optimally aligned using a suitable alignment algorithm, is about or more than about 50%, 60%, 75%, 80%, 85%, 90%, 95%, 97.5%, 99%, or more. Optimal alignment may be determined with the use of any suitable algorithm for aligning sequences, non-limiting example of which include the Smith-Waterman algorithm, the Needleman-Wunsch algorithm, algorithms based on the Burrows-Wheeler Transform (e.g., the Burrows Wheeler Aligner), ClustalW, Clustal X, BLAT, Novoalign (Novocraft Technologies; available at novocraft.com), ELAND (Illumina, San Diego, CA), SOAP (available at soap.genomics.org.cn), and Maq (available at maq.sourceforge.net). The ability of a sequence (within a nucleic acid-targeting guide sequence) to direct sequence-specific binding of a nucleic acid-targeting complex to a target nucleic acid sequence may be assessed by any suitable assay. For example, the components of a ωRNA system sufficient to form a nucleic acid-targeting complex, including the guide sequence to be tested, may be provided to a host cell having the corresponding target nucleic acid sequence, such as by transfection with vectors encoding the components of the nucleic acid-targeting complex, followed by an assessment of preferential targeting (e.g., cleavage) within the target nucleic acid sequence, such as by Surveyor assay as described herein. Similarly, cleavage of a target nucleic acid sequence (or a sequence in the vicinity thereof) may be evaluated in a test tube by providing the target nucleic acid sequence, components of a nucleic acid-targeting complex, including the sequence to be tested and a control sequence different from the test guide sequence, and comparing binding or rate of cleavage at or in the vicinity of the target sequence between the test and control guide sequence reactions. Other assays are possible, and will occur to those skilled in the art. A guide sequence, and hence a nucleic acid-targeting @ RNA may be selected to target any target nucleic acid sequence.

[0168] A ωRNA sequence, and hence a nucleic acid-targeting guide, may be selected to target any target nucleic acid sequence. The target sequence may be DNA. The target sequence may be any RNA sequence. In one embodiment, the target sequence may be a sequence within a RNA molecule selected from the group consisting of messenger RNA (mRNA), pre-mRNA, ribosomal RNA (rRNA), transfer RNA (tRNA), micro-RNA (miRNA), small interfering RNA (siRNA), small nuclear RNA (snRNA), small nucleolar RNA (snoRNA), double stranded RNA (dsRNA), non-coding RNA (ncRNA), long non-coding RNA (lncRNA), and small cytoplasmatic RNA (scRNA). In some preferred embodiments, the target sequence may be a sequence within a RNA molecule selected from the group consisting of mRNA, pre-mRNA, and rRNA. In some preferred embodiments, the target sequence may be a sequence within a RNA molecule selected from the group consisting of ncRNA, and lncRNA. In some more preferred embodiments, the target sequence may be a sequence within an mRNA molecule or a pre-mRNA molecule.

[0169] In one embodiment, the ωRNA molecule forms a stemloop with a separate non-covalently linked sequence, which can be DNA or RNA. In one embodiment, the sequences forming the @ RNA are first synthesized using the standard phosphoramidite synthetic protocol (Herdewijn, P., ed., Methods in Molecular Biology Col 288, Oligonucleotide Synthesis: Methods and Applications, Humana Press, New Jersey (2012)). In one embodiment, these sequences can be functionalized to contain an appropriate functional group for ligation using the standard protocol known in the art (Hermanson, G. T., Bioconjugate Techniques, Academic Press (2013)). Examples of functional groups include, but are not limited to, hydroxyl, amine, carboxylic acid, carboxylic acid halide, carboxylic acid active ester, aldehyde, carbonyl, chlorocarbonyl, imidazolylcarbonyl, hydrozide, semicarbazide, thio semicarbazide, thiol, maleimide, haloalkyl, sufonyl, ally, propargyl, diene, alkyne, and azide. Once this sequence is functionalized, a covalent chemical bond or linkage can be formed between this sequence and the conserved nucleotide sequence. Examples of chemical bonds include, but are not limited to, those based on carbamates, ethers, esters, amides, imines, amidines, aminotrizines, hydrozone, disulfides, thioethers, thioesters, phosphorothioates, phosphorodithioates, sulfonamides, sulfonates, fulfones, sulfoxides, ureas, thioureas, hydrazide, oxime, triazole, photolabile linkages, C—C bond forming groups such as Diels-Alder cyclo-addition pairs or ring-closing metathesis pairs, and Michael reaction pairs.

[0170] In one embodiment, these stem-loop forming sequences can be chemically synthesized. In one embodiment, the chemical synthesis uses automated, solid-phase oligonucleotide synthesis machines with 2′-acetoxyethyl orthoester (2′-ACE) (Scaringe et al., J. Am. Chem. Soc. (1998) 120:11820-11821; Scaringe, Methods Enzymol. (2000) 317:3-18) or 2′-thionocarbamate (2′-TC) chemistry (Dellinger et al., J. Am. Chem. Soc. (2011) 133:11540-11546; Hendel et al., Nat. Biotechnol. (2015) 33:985-989).

### Chemical Modifications

[0171] In an embodiment, the ωRNA molecule comprises non-naturally occurring nucleic acids and/or non-naturally occurring nucleotides and/or nucleotide analogs, and/or chemically modifications. Preferably, these non-naturally occurring nucleic acids and non-naturally occurring nucleotides are located outside the ωRNA sequence. Non-naturally occurring nucleic acids can include, for example, mixtures of naturally and non-naturally occurring nucleotides. Non-naturally occurring nucleotides and/or nucleotide analogs may be modified at the ribose, phosphate, and/or base moiety. In an embodiment of the invention, a ωRNA nucleic acid comprises ribonucleotides and non-ribonucleotides. In one such embodiment, a ωRNA comprises one or more ribonucleotides and one or more deoxyribonucleotides. In an embodiment of the invention, the ωRNA comprises one or more non-naturally occurring nucleotide or nucleotide analog such as a nucleotide with phosphorothioate linkage, locked nucleic acid (LNA) nucleotides comprising a methylene bridge between the 2′ and 4′ carbons of the ribose ring, or bridged nucleic acids (BNA). Other examples of modified nucleotides include 2′-O-methyl analogs, 2′-deoxy analogs, or 2′-fluoro analogs. Further examples of modified bases include, but are not limited to, 2-aminopurine, 5-bromo-uridine, pseudouridine, inosine, 7-methylguanosine. Examples of ωRNA chemical modifications include, without limitation, incorporation of 2′-O-methyl (M), 2′-O-methyl 3′phosphorothioate (MS), S-constrained ethyl (cEt), or 2′-O-methyl 3′thioPACE (MSP) at one or more terminal nucleotides. Such chemically modified ωRNA can comprise increased stability and increased activity as compared to unmodified ωRNA, though on-target vs. off-target specificity is not predictable. (See, Hendel, 2015, Nat Biotechnol. 33 (9): 985-9, doi: 10.1038/nbt.3290, published online 29 Jun. 2015 Ragdarm et al., 0215, PNAS, E7110-E7111; Allerson et al., J. Med. Chem. 2005, 48:901-904; Bramsen et al., Front. Genet., 2012, 3:154; Deng et al., PNAS, 2015, 112:11870-11875; Sharma et al., MedChemComm., 2014, 5:1454-1471; Hendel et al., Nat. Biotechnol. (2015) 33 (9): 985-989; Li et al., Nature Biomedical Engineering, 2017, 1, 0066 DOI: 10.1038/s41551-017-0066). In one embodiment, the 5′ and/or 3′ end of a ωRNA is modified by a variety of functional moieties including fluorescent dyes, polyethylene glycol, cholesterol, proteins, or detection tags. (See Kelly et al., 2016, J. Biotech. 233:74-83). In an embodiment, a ωRNA comprises ribonucleotides in a region that binds to a target sequence and one or more deoxyribonucletides and/or nucleotide analogs in a region that binds to the IscB polypeptide nuclease. In an embodiment, deoxyribonucleotides and/or nucleotide analogs are incorporated in engineered hRNA structures. In one embodiment, 3-5 nucleotides at either the 3′ or the 5′ end of a hRNA is chemically modified. In one embodiment, only minor modifications are introduced in the seed region, such as 2′-F modifications. In one embodiment, 2′-F modification is introduced at the 3′ end of a hRNA. In an embodiment, three to five nucleotides at the 5′ and/or the 3′ end of the hRNA are chemically modified with 2′-O-methyl (M), 2′-O-methyl 3′ phosphorothioate (MS), S-constrained ethyl (cEt), or 2′-O-methyl 3′ thioPACE (MSP). Such modification can enhance genome editing efficiency (see Hendel et al., Nat. Biotechnol. (2015) 33 (9): 985-989). In an embodiment, all of the phosphodiester bonds of a hRNA are substituted with phosphorothioates (PS) for enhancing levels of gene disruption. In an embodiment, more than five nucleotides at the 5′ and/or the 3′ end of the hRNA are chemically modified with 2′-O-Me, 2′-F or S-constrained ethyl (cEt). Such chemically modified hRNA can mediate enhanced levels of gene disruption (see Ragdarm et al., 0215, PNAS, E7110-E7111). In an embodiment of the invention, a hRNA is modified to comprise a chemical moiety at its 3′ and/or 5′ end. Such moieties include, but are not limited to amine, azide, alkyne, thio, dibenzocyclooctyne (DBCO), or Rhodamine. In certain embodiment, the chemical moiety is conjugated to the hRNA by a linker, such as an alkyl chain. In an embodiment, the chemical moiety of the modified hRNA can be used to attach the hRNA to another molecule, such as DNA, RNA, protein, or nanoparticles. Such chemically modified hRNA can be used to identify or enrich cells generically edited by a IscB polypeptide nuclease and related systems (see Lee et al., eLife, 2017, 6: e25312, DOI: 10.7554).

[0172] In a particular embodiment, the conserved nucleotide sequence may be modified to comprise one or more protein-binding RNA aptamers. In a particular embodiment, one or more aptamers may be included such as part of optimized secondary structure. Such aptamers may be capable of binding a bacteriophage coat protein as detailed further herein.

[0173] In embodiments, the IsrB polypeptide utilizes the hRNA scaffold comprising a polynucleotide sequence that facilitates the interaction with the IsrB protein, allowing for sequence specific binding and/or targeting of the guide sequence with the target polynucleotide. Chemical synthesis of the hRNA scaffold is contemplated, using covalent linkage using various bioconjugation reactions, loops, bridges, and non-nucleotide links via modifications of sugar, internucleotide phosphodiester bonds, purine and pyrimidine residues. Sletten et al., Angew. Chem. Int. Ed. (2009) 48:6974-6998; Manoharan, M. Curr. Opin. Chem. Biol. (2004) 8:570-9; Behlke et al., Oligonucleotides (2008) 18:305-19; Watts, et al., Drug. Discov. Today (2008) 13:842-55; Shukla, et al., ChemMedChem (2010) 5:328-49; chemical synthesis using automated, solid-phase oligonucleotide synthesis machines with 2′-acetoxyethyl orthoester (2′-ACE) (Scaringe et al., J. Am. Chem. Soc. (1998) 120:11820-11821; Scaringe, Methods Enzymol. (2000) 317:3-18) or 2′-thionocarbamate (2′-TC) chemistry (Dellinger et al., J. Am. Chem. Soc. (2011) 133:11540-11546; Hendel et al., Nat. Biotechnol. (2015) 33:985-989).

[0174] In certain example embodiments, the scaffold and spacer may be designed as two separate molecules that can hybridize or covalently joined into a single molecule. Covalent linkage can be via a linker (e.g., a non-nucleotide loop) that comprises a moiety such as spacers, attachments, bioconjugates, chromophores, reporter groups, dye labeled RNAs, and non-naturally occurring nucleotide analogues. More specifically, suitable spacers for purposes of this invention include, but are not limited to, polyethers (e.g., polyethylene glycols, polyalcohols, polypropylene glycol or mixtures of efhylene and propylene glycols), polyamines group (e.g., spennine, spermidine and polymeric derivatives thereof), polyesters (e.g., poly(ethyl acrylate)), polyphosphodiesters, alkylenes, and combinations thereof. Suitable attachments include any moiety that can be added to the linker to add additional properties to the linker, such as but not limited to, fluorescent labels. Suitable bioconjugates include, but are not limited to, peptides, glycosides, lipids, cholesterol, phospholipids, diacyl glycerols and dialkyl glycerols, fatty acids, hydrocarbons, enzyme substrates, steroids, biotin, digoxigenin, carbohydrates, polysaccharides. Suitable chromophores, reporter groups, and dye-labeled RNAs include, but are not limited to, fluorescent dyes such as fluorescein and rhodamine, chemiluminescent, electrochemiluminescent, and bioluminescent marker compounds. The design of example linkers conjugating two RNA components are also described in WO 2004/015075.

[0175] The linker (e.g., a non-nucleotide loop) can be of any length. In one embodiment, the linker has a length equivalent to about 0-16 nucleotides. In one embodiment, the linker has a length equivalent to about 0-8 nucleotides. In one embodiment, the linker has a length equivalent to about 0-4 nucleotides. In one embodiment, the linker has a length equivalent to about 2 nucleotides. Example linker design is also described in International Patent Publication No. WO 2011/008730.

### Escorted ωRNA Molecules

[0176] In one embodiment, the compositions or complexes have a ωRNA molecule with a functional structure designed to improve ωRNA molecule structure, architecture, stability, genetic expression, or any combination thereof. Such a structure can include an aptamer.

[0177] Aptamers are biomolecules that can be designed or selected to bind tightly to other ligands, for example using a technique called systematic evolution of ligands by exponential enrichment (SELEX; Tuerk C, Gold L: “Systematic evolution of ligands by exponential enrichment: RNA ligands to bacteriophage T4 DNA polymerase.” Science 1990, 249:505-510). Nucleic acid aptamers can for example be selected from pools of random-sequence oligonucleotides, with high binding affinities and specificities for a wide range of biomedically relevant targets, suggesting a wide range of therapeutic utilities for aptamers (Keefe, Anthony D., Supriya Pai, and Andrew Ellington. “Aptamers as therapeutics.” Nature Reviews Drug Discovery 9.7 (2010): 537-550). These characteristics also suggest a wide range of uses for aptamers as drug delivery vehicles (Levy-Nissenbaum, Etgar, et al. “Nanotechnology and aptamers: applications in drug delivery.” Trends in biotechnology 26.8 (2008): 442-449; and Hicke B J, Stephens A W. “Escort aptamers: a delivery service for diagnosis and therapy.” J Clin Invest 2000, 106:923-928.). Aptamers may also be constructed that function as molecular switches, responding to a que by changing properties, such as RNA aptamers that bind fluorophores to mimic the activity of green fluorescent protein (Paige, Jeremy S., Karen Y. Wu, and Samie R. Jaffrey. “RNA mimics of green fluorescent protein.” Science 333.6042 (2011): 642-646). It has also been suggested that aptamers may be used as components of targeted siRNA therapeutic delivery systems, for example targeting cell surface proteins (Zhou, Jiehua, and John J. Rossi. “Aptamer-targeted cell-specific RNA interference.” Silence 1.1 (2010): 4).

[0178] Accordingly, in one embodiment, the ωRNA molecule is modified, e.g., by one or more aptamer(s) designed to improve ωRNA molecule delivery, including delivery across the cellular membrane, to intracellular compartments, or into the nucleus. Such a structure can include, either in addition to the one or more aptamer(s) or without such one or more aptamer(s), moiety(ies) so as to render the ωRNA molecule deliverable, inducible or responsive to a selected effector. The invention accordingly comprehends a ωRNA molecule that responds to normal or pathological physiological conditions, including without limitation pH, hypoxia, O2 concentration, temperature, protein concentration, enzymatic concentration, lipid structure, light exposure, mechanical disruption (e.g., ultrasound waves), magnetic fields, electric fields, or electromagnetic radiation.

[0179] Light responsiveness of an inducible system may be achieved via the activation and binding of cryptochrome-2 and CIB1. Blue light stimulation induces an activating conformational change in cryptochrome-2, resulting in recruitment of its binding partner CIB1. This binding is fast and reversible, achieving saturation in <15 sec following pulsed stimulation and returning to baseline <15 min after the end of stimulation. These rapid binding kinetics result in a system temporally bound only by the speed of transcription/translation and transcript/protein degradation, rather than uptake and clearance of inducing agents. Crytochrome-2 activation is also highly sensitive, allowing for the use of low light intensity stimulation and mitigating the risks of phototoxicity. Further, in a context such as the intact mammalian brain, variable light intensity may be used to control the size of a stimulated region, allowing for greater precision than vector delivery alone may offer.

[0180] Energy sources such as electromagnetic radiation, sound energy or thermal energy may induce the guide. Advantageously, the electromagnetic radiation is a component of visible light. In a preferred embodiment, the light is a blue light with a wavelength of about 450 to about 495 nm. In an especially preferred embodiment, the wavelength is about 488 nm. In another preferred embodiment, the light stimulation is via pulses. The light power may range from about 0-9 mW/cm2. In a preferred embodiment, a stimulation paradigm of as low as 0.25 sec every 15 sec should result in maximal activation.

[0181] The chemical or energy sensitive hRNA may undergo a conformational change upon induction by the binding of a chemical source or by the energy allowing it act as a hRNA and have the IscB polypeptide nuclease system or complex function. The invention can involve applying the chemical source or energy so as to have the hRNA function and the IscB polypeptide nuclease system or complex function; and optionally further determining that the expression of the genomic locus is altered.

[0182] There are several different designs of this chemical inducible system: 1. ABI-PYL based system inducible by Abscisic Acid (ABA) (see, e.g., stke.sciencemag.org/cgi/content/abstract/sigtrans; 4/164/rs2), 2. FKBP-FRB based system inducible by rapamycin (or related chemicals based on rapamycin) (see, e.g., www.nature.com/nmeth/journal/v2/n6/full/nmeth763.html), 3. GID1-GAI based system inducible by Gibberellin (GA) (see, e.g., www.nature.com/nchembio/journal/v8/n5/full/nchembio.922.html).

[0183] A chemical inducible system can be an estrogen receptor (ER) based system inducible by 4-hydroxytamoxifen (40HT) (see, e.g., www.pnas.org/content/1Apr. 3, 1027.abstract). A mutated ligand-binding domain of the estrogen receptor called ERT2 translocates into the nucleus of cells upon binding of 4-hydroxytamoxifen. In further embodiments of the invention any naturally occurring or engineered derivative of any nuclear receptor, thyroid hormone receptor, retinoic acid receptor, estrogen receptor, estrogen-related receptor, glucocorticoid receptor, progesterone receptor, androgen receptor may be used in inducible systems analogous to the ER based inducible system.

[0184] Another inducible system is based on the design using Transient receptor potential (TRP) ion channel-based system inducible by energy, heat or radio-wave (see, e.g., www.sciencemag.org/content/336/6081/604). These TRP family proteins respond to different stimuli, including light and heat. When this protein is activated by light or heat, the ion channel will open and allow the entering of ions such as calcium into the plasma membrane. This influx of ions will bind to intracellular ion interacting partners linked to a polypeptide including the hRNA and the other components of the IsrB polypeptide nuclease/hRNA molecule complex or system, and the binding will induce the change of sub-cellular localization of the polypeptide, leading to the entire polypeptide entering the nucleus of cells. Once inside the nucleus, the hRNA protein and the other components of the IsrB polypeptide nuclease/hRNA molecule complex will be active and modulating target gene expression in cells.

[0185] While light activation may be an advantageous embodiment, sometimes it may be disadvantageous especially for in vivo applications in which the light may not penetrate the skin or other organs. In this instance, other methods of energy activation are contemplated, in particular, electric field energy and/or ultrasound which have a similar effect.

[0186] Electric field energy is preferably administered substantially as described in the art, using one or more electric pulses of from about 1 Volt/cm to about 10 k Volts/cm under in vivo conditions. Instead of or in addition to the pulses, the electric field may be delivered in a continuous manner. The electric pulse may be applied for between 1 us and 500 milliseconds, preferably between 1 us and 100 milliseconds. The electric field may be applied continuously or in a pulsed manner for 5 about minutes.

[0187] As used herein, ‘electric field energy’ is the electrical energy to which a cell is exposed. Preferably the electric field has a strength of from about 1 Volt/cm to about 10 kVolts/cm or more under in vivo conditions (see WO97/49450).

[0188] As used herein, the term “electric field” includes one or more pulses at variable capacitance and voltage and including exponential and/or square wave and/or modulated wave and/or modulated square wave forms. References to electric fields and electricity should be taken to include reference the presence of an electric potential difference in the environment of a cell. Such an environment may be set up by way of static electricity, alternating current (AC), direct current (DC), etc., as known in the art. The electric field may be uniform, non-uniform or otherwise, and may vary in strength and/or direction in a time dependent manner.

[0189] Single or multiple applications of electric field, as well as single or multiple applications of ultrasound are also possible, in any order and in any combination. The ultrasound and/or the electric field may be delivered as single or multiple continuous applications, or as pulses (pulsatile delivery).

[0190] Electroporation has been used in both in vitro and in vivo procedures to introduce foreign material into living cells. With in vitro applications, a sample of live cells is first mixed with the agent of interest and placed between electrodes such as parallel plates. Then, the electrodes apply an electrical field to the cell/implant mixture. Examples of systems that perform in vitro electroporation include the Electro Cell Manipulator ECM600 product, and the Electro Square Porator T820, both made by the BTX Division of Genetronics, Inc (see U.S. Pat. No. 5,869,326).

[0191] The known electroporation techniques (both in vitro and in vivo) function by applying a brief high voltage pulse to electrodes positioned around the treatment region. The electric field generated between the electrodes causes the cell membranes to temporarily become porous, whereupon molecules of the agent of interest enter the cells. In known electroporation applications, this electric field comprises a single square wave pulse on the order of 1000 V/cm, of about 100.mu·s duration. Such a pulse may be generated, for example, in known applications of the Electro Square Porator T820.

[0192] Preferably, the electric field has a strength of from about 1 V/cm to about 10 kV/cm under in vitro conditions. Thus, the electric field may have a strength of 1 V/cm, 2 V/cm, 3 V/cm, 4 V/cm, 5 V/cm, 6 V/cm, 7 V/cm, 8 V/cm, 9 V/cm, 10 V/cm, 20 V/cm, 50 V/cm, 100 V/cm, 200 V/cm, 300 V/cm, 400 V/cm, 500 V/cm, 600 V/cm, 700 V/cm, 800 V/cm, 900 V/cm, 1 kV/cm, 2 kV/cm, 5 kV/cm, 10 kV/cm, 20 kV/cm, 50 kV/cm or more. More preferably from about 0.5 kV/cm to about 4.0 kV/cm under in vitro conditions. Preferably the electric field has a strength of from about 1 V/cm to about 10 kV/cm under in vivo conditions. However, the electric field strengths may be lowered where the number of pulses delivered to the target site are increased. Thus, pulsatile delivery of electric fields at lower field strengths is envisaged.

[0193] Preferably, the application of the electric field is in the form of multiple pulses such as double pulses of the same strength and capacitance or sequential pulses of varying strength and/or capacitance. As used herein, the term “pulse” includes one or more electric pulses at variable capacitance and voltage and including exponential and/or square wave and/or modulated wave/square wave forms.

[0194] Preferably, the electric pulse is delivered as a waveform selected from an exponential wave form, a square wave form, a modulated wave form and a modulated square wave form.

[0195] A preferred embodiment employs direct current at low voltage. Thus, Applicants disclose the use of an electric field which is applied to the cell, tissue, or tissue mass at a field strength of between 1V/cm and 20V/cm, for a period of 100 milliseconds or more, preferably 15 minutes or more.

[0196] Ultrasound is advantageously administered at a power level of from about 0.05 W/cm2 to about 100 W/cm². Diagnostic or therapeutic ultrasound may be used, or combinations thereof.

[0197] As used herein, the term “ultrasound” refers to a form of energy which consists of mechanical vibrations the frequencies of which are so high they are above the range of human hearing. Lower frequency limit of the ultrasonic spectrum may generally be taken as about 20 kHz. Most diagnostic applications of ultrasound employ frequencies in the range 1 and 15 MHz′ (From Ultrasonics in Clinical Diagnosis, P. N. T. Wells, ed., 2nd. Edition, Publ. Churchill Livingstone [Edinburgh, London & NY, 1977]).

[0198] Ultrasound has been used in both diagnostic and therapeutic applications. When used as a diagnostic tool (“diagnostic ultrasound”), ultrasound is typically used in an energy density range of up to about 100 mW/cm2 (FDA recommendation), although energy densities of up to 750 mW/cm2 have been used. In physiotherapy, ultrasound is typically used as an energy source in a range up to about 3 to 4 W/cm2 (WHO recommendation). In other therapeutic applications, higher intensities of ultrasound may be employed, for example, HIFU at 100 W/cm up to 1 kW/cm2 (or even higher) for short periods of time. The term “ultrasound” as used in this specification is intended to encompass diagnostic, therapeutic, and focused ultrasound.

[0199] Focused ultrasound (FUS) allows thermal energy to be delivered without an invasive probe (see Morocz et al 1998 Journal of Magnetic Resonance Imaging Vol. 8, No. 1, pp. 136-142. Another form of focused ultrasound is high intensity focused ultrasound (HIFU) which is reviewed by Moussatov et al in Ultrasonics (1998) Vol. 36, No. 8, pp. 893-900 and TranHuuHue et al in Acustica (1997) Vol. 83, No. 6, pp. 1103-1106.

[0200] Preferably, a combination of diagnostic ultrasound and a therapeutic ultrasound is employed. This combination is not intended to be limiting, however, and the skilled reader will appreciate that any variety of combinations of ultrasound may be used. Additionally, the energy density, frequency of ultrasound, and period of exposure may be varied.

[0201] Preferably, the exposure to an ultrasound energy source is at a power density of from about 0.05 to about 100 Wcm-2. Even more preferably, the exposure to an ultrasound energy source is at a power density of from about 1 to about 15 Wcm-2.

[0202] Preferably, the exposure to an ultrasound energy source is at a frequency of from about 0.015 to about 10.0 MHz. More preferably the exposure to an ultrasound energy source is at a frequency of from about 0.02 to about 5.0 MHz or about 6.0 MHz. Most preferably, the ultrasound is applied at a frequency of 3 MHz.

[0203] Preferably the exposure is for periods of from about 10 milliseconds to about 60 minutes. Preferably the exposure is for periods of from about 1 second to about 5 minutes. More preferably, the ultrasound is applied for about 2 minutes. Depending on the particular target cell to be disrupted, however, the exposure may be for a longer duration, for example, for 15 minutes.

[0204] Advantageously, the target tissue is exposed to an ultrasound energy source at an acoustic power density of from about 0.05 Wcm-2 to about 10 Wcm-2 with a frequency ranging from about 0.015 to about 10 MHz (see WO 98/52609). However, alternatives are also possible, for example, exposure to an ultrasound energy source at an acoustic power density of above 100 Wcm-2, but for reduced periods of time, for example, 1000 Wcm-2 for periods in the millisecond range or less.

[0205] Preferably, the application of the ultrasound is in the form of multiple pulses; thus, both continuous wave and pulsed wave (pulsatile delivery of ultrasound) may be employed in any combination. For example, continuous wave ultrasound may be applied, followed by pulsed wave ultrasound, or vice versa. This may be repeated any number of times, in any order and combination. The pulsed wave ultrasound may be applied against a background of continuous wave ultrasound, and any number of pulses may be used in any number of groups.

[0206] Preferably, the ultrasound may comprise pulsed wave ultrasound. In a highly preferred embodiment, the ultrasound is applied at a power density of 0.7 Wcm-2 or 1.25 Wcm-2 as a continuous wave. Higher power densities may be employed if pulsed wave ultrasound is used.

[0207] Use of ultrasound is advantageous as, like light, it may be focused accurately on a target. Moreover, ultrasound is advantageous as it may be focused more deeply into tissues unlike light. It is therefore better suited to whole-tissue penetration (such as but not limited to a lobe of the liver) or whole organ (such as but not limited to the entire liver or an entire muscle, such as the heart) therapy. Another important advantage is that ultrasound is a non-invasive stimulus which is used in a wide variety of diagnostic and therapeutic applications. By way of example, ultrasound is well known in medical imaging techniques and, additionally, in orthopedic therapy. Furthermore, instruments suitable for the application of ultrasound to a subject vertebrate are widely available and their use is well known in the art.

[0208] In one embodiment, the hRNA molecule is modified by a secondary structure to increase the specificity of the IsrB polypeptide nuclease and related system and the secondary structure can protect against exonuclease activity and allow for 5′ additions to the hRNA sequence also referred to herein as a protected hRNA molecule.

[0209] In one aspect, the invention provides for hybridizing a “protector RNA” to a sequence of the hRNA molecule, wherein the “protector RNA” is an RNA strand complementary to the 3′ end of the hRNA molecule to thereby generate a partially double-stranded hRNA. In an embodiment of the invention, protecting mismatched bases (i.e., the bases of the hRNA molecule which do not form part of the hRNA sequence) with a perfectly complementary protector sequence decreases the likelihood of target DNA binding to the mismatched basepairs at the 3′ end. In one embodiment of the invention, additional sequences comprising an extended length may also be present within the hRNA molecule such that the hRNA comprises a protector sequence within the hRNA molecule. This “protector sequence” ensures that the hRNA molecule comprises a “protected sequence” in addition to an “exposed sequence” (comprising the part of the hRNA sequence hybridizing to the target sequence). In one embodiment, the hRNA molecule is modified by the presence of the protector hRNA to comprise a secondary structure such as a hairpin. Advantageously there are three or four to thirty or more, e.g., about 10 or more, contiguous base pairs having complementarity to the protected sequence, the hRNA sequence or both. It is advantageous that the protected portion does not impede thermodynamics of the IscB polypeptide nuclease and related system interacting with its target. By providing such an extension including a partially double stranded hRNA molecule, the hRNA molecule is considered protected and results in improved specific binding of the IscB polypeptide nuclease/hRNA molecule complex, while maintaining specific activity.

[0210] In one embodiment, use is made of a truncated hRNA (tru-hRNA), i.e., a hRNA molecule which comprises a hRNA sequence which is truncated in length with respect to the canonical hRNA sequence length. As described by Nowak et al. (Nucleic Acids Res (2016) 44 (20): 9555-9564), such guides may allow catalytically active IscB polypeptide nuclease to bind its target without cleaving the target DNA. In one embodiment, a truncated hRNA is used which allows the binding of the target but retains only nickase activity of the IscB polypeptide nuclease.

[0211] In one embodiment, conjugation of triantennary N-acetyl galactosamine (GalNAc) to oligonucleotide components may be used to improve delivery, for example delivery to select cell types, for example hepatocytes (see International Patent Publication No. WO 2014/118272 incorporated herein by reference; Nair, J K et al., 2014, Journal of the American Chemical Society 136 (49), 16958-16961). This is considered to be a sugar-based particle and further details on other particle delivery systems and/or formulations are provided herein. GalNAc can therefore be considered to be a particle in the sense of the other particles described herein, such that general uses and other considerations, for instance delivery of said particles, apply to GalNAc particles as well. A solution-phase conjugation strategy may for example be used to attach triantennary GalNAc clusters (mol. wt. ˜2000) activated as PFP (pentafluorophenyl) esters onto 5′-hexylamino modified oligonucleotides (5′-HA ASOs, mol. wt. ˜8000 Da; Østergaard et al., Bioconjugate Chem., 2015, 26 (8), pp 1451-1455). Similarly, poly (acrylate) polymers have been described for in vivo nucleic acid delivery (see WO2013158141 incorporated herein by reference). In further alternative embodiments, pre-mixing IscB polypeptide nuclease nanoparticles (or protein complexes) with naturally occurring serum proteins may be used in order to improve delivery (Akinc A et al, 2010, Molecular Therapy vol. 18 no. 7, 1357-1364).

[0212] Screening techniques are available to identify delivery enhancers, for example by screening chemical libraries (Gilleron J. et al., 2015, Nucl. Acids Res. 43 (16): 7984-8001). Approaches have also been described for assessing the efficiency of delivery vehicles, such as lipid nanoparticles, which may be employed to identify effective delivery vehicles for components (see Sahay G. et al., 2013, Nature Biotechnology 31, 653-658).

### Target Adjacent Motifs

[0213] The IsrB systems disclosed may recognize a target adjacent motif (TAM) in order to recognize and bind a target sequence on a target polynucleotide. In one embodiment, the nucleic acid-guided nucleases and related compositions do not contain a TAM requirement., The precise sequence and length requirements for the TAM will differ depending on the nucleic acid-guided nucleases used. In some examples, TAMs are typically 2-5 base pair sequences adjacent the protospacer (that is, the target sequence). In one example embodiment, the TAM is 3′ adjacent to the target polynucleotide. In another example embodiment, the TAM is 5′ adjacent to the target sequence of the target polynucleotide.

[0214] In one embodiment, the cleavage site is distant from the Target Adjacent Motif (TAM), e.g., the cleavage occurs after the nth nucleotide on the non-target strand and after the nucleotide on the targeted strand. In one embodiment, the cleavage site occurs after an identified nucleotide (counted from the TAM) on the non-target strand and after the further identified nucleotide (counted from the TAM) on the targeted strand. In one embodiment, a vector encodes a nucleic acid-targeting effector protein that may be mutated with respect to a corresponding wild-type enzyme such that the mutated nucleic acid-targeting effector protein lacks the ability to cleave one or both DNA and RNA strands of a target polynucleotide containing a target sequence.

[0215] TAM identification and specificity may be identified, for example, using the methods disclosed in the Examples section below.

### Paired IsrB Nickases

[0216] In one embodiment, the IsrB polypeptide nickase is used in combination with an orthogonal catalytically inactive IsrB polypeptide nuclease to increase efficiency of said nickase (e.g., as described in Chen et al. 2017, Nature Communications 8:14958; doi:10.1038/ncomms14958). More particularly, the orthogonal catalytically inactive IsrB polypeptide nuclease is characterized by a different TAM recognition site than the IsrB nickase used in the AD-functionalized composition and the corresponding guide sequence is selected to bind to a target sequence proximal to that of the nickase of the functionalized IsrB polypeptide nuclease. The orthogonal catalytically inactive IsrB polypeptide nuclease as used in the context of the present invention does not form part of the functionalized composition but merely functions to increase the efficiency of said nickase and is used in combination with a standard hRNA as described in the art for said IsrB polypeptide nuclease. In one embodiment, said orthogonal catalytically inactive IsrB polypeptide nuclease is a dead IsrB polypeptide nuclease, i.e. comprising one or more mutations which abolishes the nuclease activity of said IsrB polypeptide nuclease. In one embodiment, the catalytically inactive orthogonal IsrB polypeptide nuclease is provided with two or more ωRNAs which are capable of hybridizing to target sequences which are proximal to the target sequence of the nickase. In one embodiment, at least two ωRNAs are used to target said catalytically inactive IsrB polypeptide nuclease, of which at least one ωRNA is capable of hybridizing to a target sequence 5″ of the target sequence of the nickase and at least one ωRNA is capable of hybridizing to a target sequence 3′ of the target sequence of the nickase of the functionalized composition, whereby said one or more target sequences may be on the same or the opposite DNA strand as the target sequence of the IsrB polypeptide nickase. In one embodiment, the guide sequences for the one or more ωRNA of the orthogonal catalytically inactive IsrB polypeptide nuclease are selected such that the target sequences are proximal to that of the ωRNA for the targeting of the functionalized composition, e.g. for the targeting of the nickase. In one embodiment, the one or more target sequences of the orthogonal catalytically inactive IsrB polypeptide nuclease are each separated from the target sequence of the nickase by more than 5 but less than 450 basepairs. Optimal distances between the target sequences of the guides for use with the orthogonal catalytically inactive IsrB polypeptide nuclease and the target sequence of the functionalized composition can be determined by the skilled person. In one embodiment, the catalytically inactive orthogonal IsrB polypeptide nuclease has been modified to alter its TAM specificity as described elsewhere herein. In one embodiment, the IsrB polypeptide nickase is a nickase which, by itself has limited activity in human cells, but which, in combination with an inactive orthogonal IsrB polypeptide nuclease and one or more corresponding proximal guides ensures the required nickase activity.

### Methods of Modifying Target Polynucleotides

[0217] In one aspect, the present disclosure provides nucleic acid-targeting systems. Such systems may be used to target, modify, and otherwise manipulate a target polynucleotide. In one embodiment, the systems comprise the IsrB polypeptide and one or more ωRNAs. The IsrB polypeptide may have nuclease activity, e.g., capable of cleaving DNA. In on example embodiment, the IsrB polypeptide nuclease may have nickase activity, e.g., capable of generating a single-strand break on a target polynucleotide. IsrB nickases may be used as paired nickases to generated double-strand breaks on target polynucleotides, such as as dsDNA. The IsrB polypeptide nuclease may be in a catalytically dead form.

[0218] In one embodiment, formation of a nucleic acid-targeting complex (comprising a guide RNA hybridized to a target sequence and complexed with one or more nucleic acid-targeting effector proteins) results in cleavage of one or both nucleic acid strands in or near (e.g., within 1, 2, 3, 4, 5, 6, 7, 8, 9, 10, 20, 50, or more base pairs from) the target sequence. In one embodiment, one or more vectors driving expression of one or more elements of a nucleic acid-targeting system are introduced into a host cell such that expression of the elements of the nucleic acid-targeting system direct formation of a nucleic acid-targeting complex at one or more target sites. For example, a nucleic acid-targeting effector protein and a ωRNA could each be operably linked to separate regulatory elements on separate vectors. Alternatively, two or more of the elements expressed from the same or different regulatory elements, may be combined in a single vector, with one or more additional vectors providing any components of the nucleic acid-targeting system not included in the first vector. nucleic acid-targeting system elements that are combined in a single vector may be arranged in any suitable orientation, such as one element located 5′ with respect to (“upstream” of) or 3′ with respect to (“downstream” of) a second element. The coding sequence of one element may be located on the same or opposite strand of the coding sequence of a second element, and oriented in the same or opposite direction. In one embodiment, a single promoter drives expression of a transcript encoding a nucleic acid-targeting effector protein and a ωRNA embedded within one or more intron sequences (e.g. each in a different intron, two or more in at least one intron, or all in a single intron). In one embodiment, the nucleic acid-targeting effector protein and guide RNA are operably linked to and expressed from the same promoter.

### Multiplexing

[0219] In one embodiment, IsrB polypeptide may be used in a multiplex (tandem) targeting approach. For example, IsrB polypeptide nuclease herein can employ more than one ωRNA without losing activity. This may enable the use of the IsrB polypeptide nuclease, systems or complexes as defined herein for targeting multiple DNA targets, genes or gene loci, with a single enzyme, system or complex as defined herein. The ωRNA may be tandemly arranged, optionally separated by a nucleotide sequence such as a conserved nucleotide sequence as defined herein. The position of the different ωRNA is the tandem does not influence the activity.

[0220] In one aspect, the IsrB polypeptide nucleases may be used for tandem or multiplex targeting. It is to be understood that any of the IsrB polypeptide nucleases, complexes, or compositions herein elsewhere may be used in such an approach. Any of the methods, products, compositions and uses as described herein elsewhere are equally applicable with the multiplex or tandem targeting approach further detailed below. By means of further guidance, the following particular aspects and embodiments are provided.

[0221] In one aspect, the invention provides for the use of a IsrB polypeptide nuclease, complex or system as defined herein for targeting multiple gene loci. In one embodiment, this can be established by using multiple (tandem or multiplex) ωRNA sequences.

[0222] In one aspect, the invention provides methods for using one or more elements of a IsrB polypeptide nuclease, complex or system as defined herein for tandem or multiplex targeting, wherein said system herein comprises multiple ωRNA sequences. Said ωRNA sequences are separated by a nucleotide sequence, such as a conserved nucleotide sequence as defined herein elsewhere.

[0223] The IsrB polypeptide nucleases, compositions, systems or complexes as defined herein provides an effective means for modifying multiple target polynucleotides. The IsrB polypeptide nuclease, system or complex as defined herein has a wide variety of utility including modifying (e.g., deleting, inserting, translocating, inactivating, activating) one or more target polynucleotides in a multiplicity of cell types. As such the IsrB polypeptide nuclease, system or complex as defined herein of the invention has a broad spectrum of applications in, e.g., gene therapy, drug screening, disease diagnosis, and prognosis, including targeting multiple gene loci within a single system.

[0224] In one aspect, the present disclosure provides a IsrB polypeptide nuclease, system or complex as defined herein, having a IsrB polypeptide nuclease having at least one destabilization domain associated therewith, and multiple ωRNAs that target multiple nucleic acid molecules such as DNA molecules, whereby each of said multiple ωRNAs specifically targets its corresponding nucleic acid molecule, e.g., DNA molecule. Each nucleic acid molecule target, e.g., DNA molecule can encode a gene product or encompass a gene locus. Using multiple ωRNA hence enables the targeting of multiple gene loci or multiple genes. In one embodiment the IsrB polypeptide nuclease may cleave the DNA molecule encoding the gene product. In one embodiment expression of the gene product is altered. The IsrB polypeptide nuclease and the ωRNAs do not naturally occur together. The present disclosure comprehends the ωRNA comprising tandemly arranged guide sequences. The present disclosure further comprehends coding sequences for the IsrB polypeptide nuclease being codon optimized for expression in a eukaryotic cell. In an embodiment the eukaryotic cell is a mammalian cell, a plant cell or a yeast cell and in a more preferred embodiment the mammalian cell is a human cell. Expression of the gene product may be decreased. The IsrB polypeptide nuclease may form part of a system or complex, which further comprises tandemly arranged ωRNA comprising a series of 2, 3, 4, 5, 6, 7, 8, 9, 10, 15, 25, 25, 30, or more than 30 guide sequences, each capable of specifically hybridizing to a target sequence in a genomic locus of interest in a cell. In one embodiment, the functional system or complex binds to the multiple target sequences. In one embodiment, the functional system or complex may edit the multiple target sequences, e.g., the target sequences may comprise a genomic locus, and In one embodiment, there may be an alteration of gene expression. In one embodiment, the functional system or complex may comprise further functional domains. In one embodiment, the invention provides a method for altering or modifying expression of multiple gene products. The method may comprise introducing into a cell containing said target nucleic acids, e.g., DNA molecules, or containing and expressing target nucleic acid, e.g., DNA molecules; for instance, the target nucleic acids may encode gene products or provide for expression of gene products (e.g., regulatory sequences).

[0225] In one embodiment, the IsrB polypeptide nuclease used for multiplex targeting is IsrB with one or more functional domains. In some more specific embodiments, the IscB polypeptide nuclease used for multiplex targeting is a dead IsrB polypeptide nuclease. The inventors have found that the IsrB polypeptide nuclease as described herein may enable improved and/or direct access to one or more nucleotides involved in the DNA: RNA duplex.

### Homologous Recombination Donor Templated Editing

[0226] In one embodiment, the compositions and systems herein may comprise one or more nucleic acid templates. In some cases, the nucleic acid template may comprise one or more polynucleotides. In certain cases, the nucleic acid template may comprise coding sequences for one or more polynucleotides. The nucleic acid template may be an RNA template. The nucleic acid template may be a DNA template.

[0227] The donor polynucleotide may be used for editing the target polynucleotide. In some cases, the donor polynucleotide comprises one or more mutations to be introduced into the target polynucleotide. Examples of such mutations include substitutions, deletions, insertions, or a combination thereof. The mutations may cause a shift in an open reading frame on the target polynucleotide. In some cases, the donor polynucleotide alters a stop codon in the target polynucleotide. For example, the donor polynucleotide may correct a premature stop codon. The correction may be achieved by deleting the stop codon or introduces one or more mutations to the stop codon. In other example embodiments, the donor polynucleotide addresses loss of function mutations, deletions, or translocations that may occur, for example, in certain disease contexts by inserting or restoring a functional copy of a gene, or functional fragment thereof, or a functional regulatory sequence or functional fragment of a regulatory sequence. A functional fragment refers to less than the entire copy of a gene by providing sufficient nucleotide sequence to restore the functionality of a wild type gene or non-coding regulatory sequence (e.g., sequences encoding long non-coding RNA). In certain example embodiments, the systems disclosed herein may be used to replace a single allele of a defective gene or defective fragment thereof. In another example embodiment, the systems disclosed herein may be used to replace both alleles of a defective gene or defective gene fragment. A “defective gene” or “defective gene fragment” is a gene or portion of a gene that when expressed fails to generate a functioning protein or non-coding RNA with functionality of a corresponding wild-type gene. In certain example embodiments, these defective genes may be associated with one or more disease phenotypes. In certain example embodiments, the defective gene or gene fragment is not replaced but the systems described herein are used to insert donor polynucleotides that encode gene or gene fragments that compensate for or override defective gene expression such that cell phenotypes associated with defective gene expression are eliminated or changed to a different or desired cellular phenotype.

[0228] In an embodiment of the invention, the donor polynucleotide may include, but not be limited to, genes or gene fragments, encoding proteins or RNA transcripts to be expressed, regulatory elements, repair templates, and the like. According to the invention, the donor polynucleotides may comprise left end and right end sequence elements that function with transposition components that mediate insertion.

[0229] In certain cases, the donor polynucleotide manipulates a splicing site on the target polynucleotide. In some examples, the donor polynucleotide disrupts a splicing site. The disruption may be achieved by inserting the polynucleotide to a splicing site and/or introducing one or more mutations to the splicing site. In certain examples, the donor polynucleotide may restore a splicing site. For example, the polynucleotide may comprise a splicing site sequence.

[0230] The donor polynucleotide to be inserted may has a size from 10 basepair or nucleotides to 50 kb in length, e.g., from 50 to 40 k, from 100 and 30 k, from 100 to 10000, from 100 to 300, from 200 to 400, from 300 to 500, from 400 to 600, from 500 to 700, from 600 to 800, from 700 to 900, from 800 to 1000, from 900 to from 1100, from 1000 to 1200, from 1100 to 1300, from 1200 to 1400, from 1300 to 1500, from 1400 to 1600, from 1500 to 1700, from 600 to 1800, from 1700 to 1900, from 1800 to 2000 base pairs (bp) or nucleotides in length.

### Inducible Systems

[0231] In one embodiment, a IsrB polypeptide nuclease may form a component of an inducible system. The inducible nature of the system would allow for spatiotemporal control of gene editing or gene expression using a form of energy. The form of energy may include but is not limited to electromagnetic radiation, sound energy, chemical energy and thermal energy. Examples of inducible system include tetracycline inducible promoters (Tet-On or Tet-Off), small molecule two-hybrid transcription activations systems (FKBP, ABA, etc.), or light inducible systems (Phytochrome, LOV domains, or cryptochrome). In one embodiment, the IscB polypeptide or CRISPR-associated IscB polypeptide nuclease may be a part of a Light Inducible Transcriptional Effector (LITE) to direct changes in transcriptional activity in a sequence-specific manner. The components of a light may include a IsrB polypeptide nuclease, a light-responsive cytochrome heterodimer (e.g. from Arabidopsis thaliana), and a transcriptional activation/repression domain. Further examples of inducible DNA binding proteins and methods for their use are provided in U.S. Provisional Application Nos. 61/736,465 and U.S. 61/721,283, and International Patent Publication No. WO 2014/018423 A2 which is hereby incorporated by reference in its entirety.

### Self-Inactivating Systems

[0232] Once all copies of a gene in the genome of a cell have been edited, continued expression of the system in that cell is no longer necessary. Indeed, sustained expression would be undesirable in case of off-target effects at unintended genomic sites, etc. Thus time-limited expression would be useful. Inducible expression offers one approach, but in addition Applicants have engineered a self-inactivating system that relies on the use of a non-coding guide target sequence within the vector itself. Thus, after expression begins, the system will lead to its own destruction, but before destruction is complete it will have time to edit the genomic copies of the target gene (which, with a normal point mutation in a diploid cell, requires at most two edits). Simply, the self-inactivating system includes additional RNA (e.g., ωRNA) that targets the coding sequence for the IsrB polypeptide nuclease itself or that targets one or more non-coding guide target sequences complementary to unique sequences present in one or more of the following: (a) within the promoter driving expression of the non-coding RNA elements, (b) within the promoter driving expression of the IsrB polypeptide nuclease gene, (c) within 100 bp of the ATG translational start codon in the IsrB polypeptide nuclease coding sequence, (d) within the inverted terminal repeat (iTR) of a viral delivery vector, e.g., in the AAV genome.

[0233] In some aspects, a single ωRNA is provided that is capable of hybridization to a sequence downstream of a IsrB polypeptide nuclease start codon, whereby after a period of time there is a loss of the IsrB polypeptide nuclease expression. In some aspects, one or more ωRNA are provided that are capable of hybridization to one or more coding or non-coding regions of the polynucleotide encoding the system, whereby after a period of time there is a inactivation of one or more, or in some cases all, of the system. In some aspects of the system, and not to be limited by theory, the cell may comprise a plurality of complexes, wherein a first subset of complexes comprise a first @ RNA capable of targeting a genomic locus or loci to be edited, and a second subset of complexes comprise at least one ωRNA capable of targeting the polynucleotide encoding the system, wherein the first subset of complexes mediate editing of the targeted genomic locus or loci and the second subset of complexes eventually inactivate the system, thereby inactivating further expression in the cell.

[0234] The various coding sequences (IsrB polypeptide nuclease and ωRNAs) can be included on a single vector or on multiple vectors. For instance, it is possible to encode the enzyme on one vector and the various RNA sequences on another vector, or to encode the enzyme and one ωRNA on one vector, and the remaining ωRNA on another vector, or any other permutation. In general, a system using a total of one or two different vectors is preferred.

[0235] Where multiple vectors are used, it is possible to deliver them in unequal numbers, and ideally with an excess of a vector which encodes the first ωRNA relative to the second ωRNA, thereby assisting in delaying final inactivation of the system until genome editing has had a chance to occur.

[0236] The first ωRNA can target any target sequence of interest within a genome, as described elsewhere herein. The second ωRNA targets a sequence within the vector which encodes the IsrB polypeptide nuclease, and thereby inactivates the enzyme's expression from that vector. Thus the target sequence in the vector must be capable of inactivating expression. Suitable target sequences can be, for instance, near to or within the translational start codon for the IsrB polypeptide nuclease coding sequence, in a non-coding sequence in the promoter driving expression of the non-coding RNA elements, within the promoter driving expression of the IsrB polypeptide nuclease gene, within 100 bp of the ATG translational start codon in the IscB polypeptide nuclease coding sequence, and/or within the inverted terminal repeat (iTR) of a viral delivery vector, e.g., in the AAV genome. A double stranded break near this region can induce a frame shift in the IsrB polypeptide nuclease coding sequence, causing a loss of protein expression. An alternative target sequence for the “self-inactivating” ωRNA would aim to edit/inactivate regulatory regions/sequences needed for the expression of the system or for the stability of the vector. For instance, if the promoter for the IsrB polypeptide nuclease coding sequence is disrupted then transcription can be inhibited or prevented. Similarly, if a vector includes sequences for replication, maintenance or stability then it is possible to target these. For instance, in a AAV vector a useful target sequence is within the iTR. Other useful sequences to target can be promoter sequences, polyadenylation sites, etc.

[0237] Furthermore, if the ωRNA are expressed in array format, the “self-inactivating” ωRNA that target both promoters simultaneously will result in the excision of the intervening nucleotides from within the IsrB polypeptide nuclease expression construct, effectively leading to its complete inactivation. Similarly, excision of the intervening nucleotides will result where the ωRNA target both ITRs, or targets two or more other components simultaneously. Self-inactivation as explained herein is applicable, in general, with systems in order to provide regulation of the systems. For example, self-inactivation as explained herein may be applied to the repair of mutations, for example expansion disorders, as explained herein. As a result of this self-inactivation, repair may be only transiently active.

[0238] Addition of non-targeting nucleotides to the 5′ end (e.g. 1-10 nucleotides, preferably 1-5 nucleotides) of the “self-inactivating” ωRNA can be used to delay its processing and/or modify its efficiency as a means of ensuring editing at the targeted genomic locus prior to shut down.

[0239] In one aspect of the self-inactivating AAV system, plasmids that co-express one or more ωRNA targeting genomic sequences of interest (e.g. 1-2, 1-5, 1-10, 1-15, 1-20, 1-30) may be established with “self-inactivating” ωRNA that target an IsrB polypeptide nuclease sequence at or near the engineered ATG start site (e.g. within 5 nucleotides, within 15 nucleotides, within 30 nucleotides, within 50 nucleotides, within 100 nucleotides). A regulatory sequence in the U6 promoter region can also be targeted with an ωRNA. The U6-driven guide RNAs may be designed in an array format such that multiple ωRNA sequences can be simultaneously released. When first delivered into target tissue/cells (left cell) ωRNA begin to accumulate while IsrB polypeptide nuclease levels rise in the nucleus. IsrB polypeptide nuclease complexes with all of the ωRNAs to mediate genome editing and self-inactivation of the IsrB polypeptide nuclease plasmids.

[0240] One aspect of a self-inactivating system is expression of singly or in tandem array format from 1 up to 4 or more different ωRNA sequences; e.g. up to about 20 or about 30 ωRNA sequences. Each individual self-inactivating ωRNA sequence may target a different target. Such may be processed from, e.g. one chimeric pol3 transcript. Pol3 promoters such as U6 or HI promoters may be used. Pol2 promoters such as those mentioned throughout herein. Inverted terminal repeat (iTR) sequences may flank the Pol3 promoter-ωRNA-Pol2 promoter-IsrB polypeptide nuclease.

[0241] One aspect of a tandem array transcript is that one or more ωRNA edit the one or more target(s) while one or more self-inactivating ωRNA inactivate the system. Thus, for example, the described system for repairing expansion disorders may be directly combined with the self-inactivating system described herein. Such a system may, for example, have two ωRNA directed to the target region for repair as well as at least a third ωRNA directed to self-inactivation of the IsrB polypeptide nuclease or systems.

[0242] The ωRNA may be a control guide. For example, it may be engineered to target a nucleic acid sequence encoding the IsrB polypeptide nuclease itself, as described in U.S. Patent Publication No. US2015232881A1, the disclosure of which is hereby incorporated by reference. In one embodiment, a system or composition may be provided with just the ωRNA engineered to target the nucleic acid sequence encoding the IsrB polypeptide nuclease. In addition, the system or composition may be provided with the ωRNA engineered to target the nucleic acid sequence encoding the IsrB polypeptide nuclease, as well as nucleic acid sequence encoding the IsrB polypeptide nuclease and, optionally a second @ RNA and, further optionally, a repair template. The second ωRNA may be the primary target of the system or composition (such a therapeutic, diagnostic, knock out etc. as defined herein). In this way, the system or composition is self-inactivating. This is exemplified in relation to Cas in US2015232881A1 (also published as WO2015070083 (A1) referenced elsewhere herein, and may be extrapolated to other IsrB polypeptide nuclease, e.g. IsrB polypeptides.

### Base Editing

[0243] The present disclosure also provides for base editing systems. In general, such a system may comprise a deaminase (e.g., an adenosine deaminase or cytidine deaminase) associated (e.g., fused) with a IsrB polypeptide. The IsrB polypeptide may be a dead IsrB polypeptide (such as a IsrB polypeptide nickase, e.g., engineered from a IsrB polypeptide nuclease). In certain examples, the nucleotide deaminase is a mutated form of an adenosine deaminase. The mutated form of the adenosine deaminase may have both adenosine deaminase and cytidine deaminase activities.

[0244] In some examples, the present disclosure provides an engineered, non-naturally occurring composition comprising: the nuclei acid-guided nuclease that is catalytically inactive, a nucleotide deaminase associated with or otherwise capable of forming a complex with the IsrB protein, and a single hRNA molecule or single guide RNA molecule capable of forming a complex with the IsrB protein and directing site-specific binding at a target sequence.

[0245] In one aspect, the present disclosure provides an engineered adenosine deaminase. The engineered adenosine deaminase may comprise one or more mutations herein. In one embodiment, the engineered adenosine deaminase has cytidine deaminase activity. In certain examples, the engineered adenosine deaminase has both cytidine deaminase activity and adenosine deaminase. In some cases, the modifications by base editors herein may be used for targeting post-translational signaling or catalysis. In one embodiment, compositions herein comprise nucleotide sequence comprising encoding sequences for one or more components of a base editing system. A base-editing system may comprise a deaminase (e.g., an adenosine deaminase or cytidine deaminase) fused with a IsrB polypeptide nuclease or a variant thereof. In some cases, the target polynucleotide is edited at one or more bases to introduce a G→A or C→T mutation.

[0246] In some cases, the adenosine deaminase is double-stranded RNA-specific adenosine deaminase (ADAR). Examples of ADARs include those described Yiannis A Savva et al., The ADAR protein family, Genome Biol. 2012; 13 (12): 252, which is incorporated by reference in its entirety. In some examples, the ADAR may be hADAR1. In certain examples, the ADAR may be hADAR2. The sequence of hADAR2 may be that described under Accession No. AF525422.1.

[0247] In some cases, the deaminase may be a deaminase domain, e.g., a deaminase domain of ADAR (“ADAR-D”). In one example, the deaminase may be the deaminase domain of hADAR2 (“hADAR2-D), e.g., as described in Phelps K J et al., Recognition of duplex RNA by the deaminase domain of the RNA editing enzyme ADAR2. Nucleic Acids Res. 2015 January; 43 (2): 1123-32, which is incorporated by reference herein in its entirety. In a particular example, the hADAR2-D has a sequence comprising amino acid 299-701 of hADAR2-D, e.g., amino acid 299-701 of the sequence under Accession No. AF525422.1.

[0248] In certain examples, the system comprises a mutated form of an adenosine deaminase fused with a dead IsrB polypeptide nuclease (e.g., a IsrB polypeptide nickase). The mutated form of the adenosine deaminase may have both adenosine deaminase and cytidine deaminase activities. In one embodiment, the adenosine deaminase may comprise one or more of the mutations: E488Q based on amino acid sequence positions of hADAR2-D, and mutations in a homologous ADAR protein corresponding to the above. In one embodiment, the adenosine deaminase may comprise one or more of the mutations: E488Q, V351G, based on amino acid sequence positions of hADAR2-D, and mutations in a homologous ADAR protein corresponding to the above. In one embodiment, the adenosine deaminase may comprise one or more of the mutations: E488Q, V351G, S486A, based on amino acid sequence positions of hADAR2-D, and mutations in a homologous ADAR protein corresponding to the above. In one embodiment, the adenosine deaminase may comprise one or more of the mutations: E488Q, V351G, S486A, T375S, based on amino acid sequence positions of hADAR2-D, and mutations in a homologous ADAR protein corresponding to the above. In one embodiment, the adenosine deaminase may comprise one or more of the mutations: E488Q, V351G, S486A, T375S, S370C, based on amino acid sequence positions of hADAR2-D, and mutations in a homologous ADAR protein corresponding to the above. In one embodiment, the adenosine deaminase may comprise one or more of the mutations: E488Q, V351G, S486A, T375S, S370C, P462A, based on amino acid sequence positions of hADAR2-D, and mutations in a homologous ADAR protein corresponding to the above. In one embodiment, the adenosine deaminase may comprise one or more of the mutations: E488Q, V351G, S486A, T375S, S370C, P462A, N597I, based on amino acid sequence positions of hADAR2-D, and mutations in a homologous ADAR protein corresponding to the above. In one embodiment, the adenosine deaminase may comprise one or more of the mutations: E488Q, V351G, S486A, T375S, S370C, P462A, N597I, L332I, based on amino acid sequence positions of hADAR2-D, and mutations in a homologous ADAR protein corresponding to the above. In one embodiment, the adenosine deaminase may comprise one or more of the mutations: E488Q, V351G, S486A, T375S, S370C, P462A, N597I, L332I, I398V, based on amino acid sequence positions of hADAR2-D, and mutations in a homologous ADAR protein corresponding to the above. In one embodiment, the adenosine deaminase may comprise one or more of the mutations: E488Q, V351G, S486A, T375S, S370C, P462A, N597I, L332I, I398V, K350I, based on amino acid sequence positions of hADAR2-D, and mutations in a homologous ADAR protein corresponding to the above. In one embodiment, the adenosine deaminase may comprise one or more of the mutations: E488Q, V351G, S486A, T375S, S370C, P462A, N597I, L332I, I398V, K350I, M383L, based on amino acid sequence positions of hADAR2-D, and mutations in a homologous ADAR protein corresponding to the above. In one embodiment, the adenosine deaminase may comprise one or more of the mutations:

[0249] E488Q, V351G, S486A, T375S, S370C, P462A, N597I, L332I, I398V, K350I, M383L, D619G, based on amino acid sequence positions of hADAR2-D, and mutations in a homologous ADAR protein corresponding to the above. In one embodiment, the adenosine deaminase may comprise one or more of the mutations: E488Q, V351G, S486A, T375S, S370C, P462A, N597I, L332I, I398V, K350I, M383L, D619G, S582T, based on amino acid sequence positions of hADAR2-D, and mutations in a homologous ADAR protein corresponding to the above. In one embodiment, the adenosine deaminase may comprise one or more of the mutations: E488Q, V351G, S486A, T375S, S370C, P462A, N597I, L332I, I398V, K350I, M383L, D619G, S582T, V440I based on amino acid sequence positions of hADAR2-D, and mutations in a homologous ADAR protein corresponding to the above. In one embodiment, the adenosine deaminase may comprise one or more of the mutations: E488Q, V351G, S486A, T375S, S370C, P462A, N597I, L332I, I398V, K350I, M383L, D619G, S582T, V440I, S495N based on amino acid sequence positions of hADAR2-D, and mutations in a homologous ADAR protein corresponding to the above. In one embodiment, the adenosine deaminase may comprise one or more of the mutations: E488Q, V351G, S486A, T375S, S370C, P462A, N597I, L332I, I398V, K350I, M383L, D619G, S582T, V440I, S495N, K418E based on amino acid sequence positions of hADAR2-D, and mutations in a homologous ADAR protein corresponding to the above. In one embodiment, the adenosine deaminase may comprise one or more of the mutations: E488Q, V351G, S486A, T375S, S370C, P462A, N597I, L332I, I398V, K350I, M383L, D619G, S582T, V440I, S495N, K418E, S661T based on amino acid sequence positions of hADAR2-D, and mutations in a homologous ADAR protein corresponding to the above. In some examples, provided herein includes a mutated adenosine deaminase e.g., an adenosine deaminase comprising one or more mutations of E488Q, V351G, S486A, T375S, S370C, P462A, N597I, L332I, I398V, K350I, M383L, D619G, S582T, V440I, S495N, K418E, S661T, fused with a dead IsrB polypeptide nuclease or IsrB polypeptide nickase. In some examples, provided herein includes a mutated adenosine deaminase e.g., an adenosine deaminase comprising E488Q, V351G, S486A, T375S, S370C, P462A, N597I, L332I, I398V, K350I, M383L, D619G, S582T, V440I, S495N, K418E, and S661T, fused with a dead IsrB polypeptide nuclease or IsrB polypeptide nickase. In some examples, provided herein includes a mutated adenosine deaminase e.g., an adenosine deaminase comprising E488Q, V351G, S486A, T375S, S370C, P462A, N597I, L332I, I398V, K350I, M383L, D619G, S582T, V440I, S495N, K418E, S661T, and S375N fused with a dead IsrB polypeptide nuclease or IsrB polypeptide nickase.

[0250] In one embodiment, the adenosine deaminase may be a tRNA-specific adenosine deaminase or a variant thereof. In one embodiment, the adenosine deaminase may comprise one or more of the mutations: W23L, W23R, R26G, H36L, N37S, P48S, P48T, P48A, 149V, R51L, N72D, L84F, S97C, A106V, D108N, H123Y, G125A, A142N, S146C, D147Y, R152H, R152P, E155V, I156F, K157N, K161T, based on amino acid sequence positions of E. coli TadA, and mutations in a homologous deaminase protein corresponding to the above. In one embodiment, the adenosine deaminase may comprise one or more of the mutations: D108N based on amino acid sequence positions of E. coli TadA, and mutations in a homologous deaminase protein corresponding to the above. In one embodiment, the adenosine deaminase may comprise one or more of the mutations: A106V, D108N, based on amino acid sequence positions of E. coli TadA, and mutations in a homologous deaminase protein corresponding to the above. In one embodiment, the adenosine deaminase may comprise one or more of the mutations: A106V, D108N, D147Y, E155V, based on amino acid sequence positions of E. coli TadA, and mutations in a homologous deaminase protein corresponding to the above. In one embodiment, the adenosine deaminase may comprise one or more of the mutations: A106V, D108N, based on amino acid sequence positions of E. coli TadA, and mutations in a homologous deaminase protein corresponding to the above. In one embodiment, the adenosine deaminase may comprise one or more of the mutations: A106V, D108N, D147Y, E155V, L84F, H123Y, I156F, based on amino acid sequence positions of E. coli TadA, and mutations in a homologous deaminase protein corresponding to the above. In one embodiment, the adenosine deaminase may comprise one or more of the mutations: A106V, D108N, D147Y, E155V, L84F, H123Y, I156F, A142N, based on amino acid sequence positions of E. coli TadA, and mutations in a homologous deaminase protein corresponding to the above. In one embodiment, the adenosine deaminase may comprise one or more of the mutations: A106V, D108N, D147Y, E155V, L84F, H123Y, I156F, H36L, R51L, S146C, K157N, based on amino acid sequence positions of E. coli TadA, and mutations in a homologous deaminase protein corresponding to the above. In one embodiment, the adenosine deaminase may comprise one or more of the mutations: A106V, D108N, D147Y, E155V, L84F, H123Y, I156F, H36L, R51L, S146C, K157N, P48S, based on amino acid sequence positions of E. coli TadA, and mutations in a homologous deaminase protein corresponding to the above. In one embodiment, the adenosine deaminase may comprise one or more of the mutations: A106V, D108N, D147Y, E155V, L84F, H123Y, I156F, H36L, R51L, S146C, K157N, P48S, A142N, based on amino acid sequence positions of E. coli TadA, and mutations in a homologous deaminase protein corresponding to the above. In one embodiment, the adenosine deaminase may comprise one or more of the mutations: A106V, D108N, D147Y, E155V, L84F, H123Y, I156F, H36L, R51L, S146C, K157N, P48S, W23R, P48A, based on amino acid sequence positions of E. coli TadA, and mutations in a homologous deaminase protein corresponding to the above. In one embodiment, the adenosine deaminase may comprise one or more of the mutations: A106V, D108N, D147Y, E155V, L84F, H123Y, I156F, H36L, R51L, S146C, K157N, P48S, W23R, P48A, A142N, based on amino acid sequence positions of E. coli TadA, and mutations in a homologous deaminase protein corresponding to the above. In one embodiment, the adenosine deaminase may comprise one or more of the mutations: A106V, D108N, D147Y, E155V, L84F, H123Y, I156F, H36L, R51L, S146C, K157N, P48S, W23R, P48A, R152P, based on amino acid sequence positions of E. coli TadA, and mutations in a homologous deaminase protein corresponding to the above. In one embodiment, the adenosine deaminase may comprise one or more of the mutations: A106V, D108N, D147Y, E155V, L84F, H123Y, I156F, H36L, R51L, S146C, K157N, P48S, W23R, P48A, R152P, A142N, based on amino acid sequence positions of E. coli TadA, and mutations in a homologous deaminase protein corresponding to the above.

[0251] In some examples, the base editing systems may comprise an intein-mediated trans-splicing system that enables in vivo delivery of a base editor, e.g., a split-intein cytidine base editors (CBE) or adenine base editor (ABE) engineered to trans-splice. Examples of the such base editing systems include those described in Colin K. W. Lim et al., Treatment of a Mouse Model of ALS by In Vivo Base Editing, Mol Ther. 2020 Jan. 14. pii: S1525-0016 (20) 30011-3. doi: 10.1016/j.ymthe.2020.01.005; and Jonathan M. Levy et al., Cytosine and adenine base editing of the brain, liver, retina, heart and skeletal muscle of mice via adeno-associated viruses, Nature Biomedical Engineering volume 4, pages97-110 (2020), which are incorporated by reference herein in their entireties.

[0252] Examples of base editing systems include those described in International Patent Publication Nos. WO 2019/071048 (e.g. paragraphs [0933]-[0938]), WO 2019/084063 (e.g., paragraphs [0173]-[0186], [0323]-[0475], [0893]-[1094]), WO 2019/126716 (e.g., paragraphs [0290]-[0425], [1077]-[1084]), WO 2019/126709 (e.g., paragraphs [0294]-[0453]), WO 2019/126762 (e.g., paragraphs [0309]-[0438]), WO 2019/126774 (e.g., paragraphs [0511]-[0670]), Cox et al., RNA editing with CRISPR-Cas13, 358 Science. 1019-1027 (2017); Abudayyeh et al., A cytosine deaminase for programmable single-base RNA editing, 365 Science 382-386 (July 2019).; Gaudelli et al., Programmable base editing of A·T to G·C in genomic DNA without DNA cleavage, 551 Nature volume 464-471 (November 2017); Komor et al., Programmable editing of a target base in genomic DNA without double-stranded DNA cleavage. 19 Nature. 420-4 (2016); Doman et al., Evaluation and minimization of Cas9-independent off-target DNA editing by cytosine base editors, Nat Biotechnol (2020). doi.org/10.1038/s41587-020-0414-6; and Richter et al., Phage-assisted evolution of an adenine base editor with improved Cas domain compatibility and activity, Nat Biotechnol (2020). doi.org/10.1038/s41587-020-0453-z, which are incorporated by reference herein in their entireties and can be used to adapt to the IsrB polypeptides for base editing purposes.

### Prime Editing

[0253] In one embodiment, the present disclosure provides compositions and systems may comprise a catalyticall inactive IsrB polypeptide fused or linked to a reverse transcriptase and a prime editing ωRNA that both specifies the target site and encodes the desired edit. See e.g. Anzalone et al. Search-and-replace genome editing without double-strand breaks or donor DNA. 576 Nature, 149-157 (2019). Prime editing systems may be used to precisely install C⋅G-to-T∩A or A⋅T-to-G⋅C transition mutations, or C⋅G-to-G⋅C transversion mutations without requiring single or double-strand breaks. Prime editors can install any of the twelve possible base pair substitutions as well as small insertion and deletions (e.g. up to ˜40 bp insertions and ˜80 bp deletions). In addition, twin prime editing, which enables the deletion, substitution, or insertion of larger DNA sequences may be used. See e.g. Twin prime editing uses a pair of prime editing ωRNAs, each of which targets a different DNA strand around a targeted modification site on a target polynucleotide and templates the synthesis of a 3′flap that is complementary to the 3′ flap templated by the other prime editing ωRNA. See e.g. Anzalone et al. Programmable large DNA deletion, replacement, integration, and inversion with twin prime editing and site-specific recombinases. bioRxiv (November (2, 2021), https://doi.org/10.1101/2021/11.01.466780.

[0254] In certain aspects, the reverse transcriptase is Human immunodeficiency virus (HIV) RT, Avian myoblastosis virus (AMV) RT, Moloney murine leukemia virus (M-MLV) RT a group II intron RT, a group II intron-like RT, or a chimeric RT. In an embodiment, the RT comprises modified forms of these RTs, such as, engineered variants of Avian myoblastosis virus (AMV) RT, Moloney murine leukemia virus (M-MLV) RT, or Human immunodeficiency virus (HIV) RT (see, e.g., Anzalone, et al., Search-and-replace genome editing without double-strand breaks or donor DNA, Nature. 2019 December; 576 (7785): 149-157).

[0255] In some examples, the compositions and systems may comprise the IsrB protein disclosed herein; a reverse transcriptase (RT) polypeptide connected to or otherwise capable of forming a complex with the IsrB polypeptide; and a ωRNA capable of forming a complex with the IsrB polypeptide and comprising: a ωRNA capable of directing site-specific binding of the IsrB polypeptide complex to a target sequence of a target polynucleotide; a 3′ binding site region capable of binding to a cleaved upstream strand of the target polynucleotide; and a RT template sequence encoding an extended sequence, wherein the extended sequence comprises a variant region and a 3′ homologous sequence capable of hybridization to the downstream cleaved strand of the target polynucleotide.

[0256] A reverse transcriptase domain may be a reverse transcriptase or a fragment thereof. A wide variety of reverse transcriptases (RT) may be used in alternative embodiments of the present invention, including prokaryotic and eukaryotic RT, provided that the RT functions within the host to generate a donor polynucleotide sequence from the RNA template. If desired, the nucleotide sequence of a native RT may be modified, for example using known codon optimization techniques, so that expression within the desired host is optimized. A reverse transcriptase (RT) is an enzyme used to generate complementary DNA (cDNA) from an RNA template, a process termed reverse transcription. Reverse transcriptases are used by retroviruses to replicate their genomes, by retrotransposon mobile genetic elements to proliferate within the host genome, by eukaryotic cells to extend the telomeres at the ends of their linear chromosomes, and by some non-retroviruses such as the hepatitis B virus, a member of the Hepadnaviridae, which are dsDNA-RT viruses. Retroviral RT has three sequential biochemical activities: RNA-dependent DNA polymerase activity, ribonuclease H, and DNA-dependent DNA polymerase activity. Collectively, these activities enable the enzyme to convert single-stranded RNA into double-stranded cDNA. In an embodiment, the RT domain of a reverse transcriptase is used in the present invention. The domain may include only the RNA-dependent DNA polymerase activity. In some examples, the RT domain is non-mutagenic, i.e., does not cause mutation in the donor polynucleotide (e.g., during the reverse transcriptase process). In some cases, In some examples, the RT domain may be non-retron RT, e.g., a viral RT or a human endogenous RTs. In some examples, the RT domain may be retron RT or DGRs RT. In some example, the RT may be less mutagenic than a counterpart wildtype RT. In one embodiment, the RT herein is not mutagenic.

[0257] The reverse transcriptase may be fused to the C-terminus of a IsrB polypeptide nuclease. Alternatively or additionally, the reverse transcriptase may be fused to the N-terminus of a IsrB polypeptide nuclease. The fusion may be via a linker and/or an adaptor protein. In some examples, the reverse transcriptase may be an M-MLV reverse transcriptase or variant thereof. The M-MLV reverse transcriptase variant may comprise one or more mutations. For the examples, the M-ML V reverse transcriptase may comprise D200N, L603W, and T330P. In another example, the M-MLV reverse transcriptase may comprise D200N, L603W, T330P, T306K, and W313F. In a particular example, the fusion of IsrB polypeptide nuclease and reverse transcriptase is IsrB polypeptide nuclease (with a mutation corresponding to H840A of SpCas9) reverse fused with M-MLV transcriptase (D200N+L603W+T330P+T306K+W313F).

[0258] A single-strand break (a nick) may be generated on the target DNA by the IsrB polypeptide nuclease at the target site to expose a 3′-hydroxyl group, thus priming the reverse transcription of an edit-encoding extension on the ωRNA directly into the target site. These steps may result in a branched intermediate with two redundant single-stranded DNA flaps: a 5′ flap that contains the unedited DNA sequence, and a 3′ flap that contains the edited sequence copied from the hRNA. The 5′ flaps may be removed by a structure-specific endonuclease, e.g., FEN122, which excises 5′ flaps generated during lagging-strand DNA synthesis and long-patch base excision repair. The non-edited DNA strand may be nicked to induce bias DNA repair to preferentially replace the non-edited strand. Examples of prime editing systems and methods include those described in Anzalone A V et al., Search-and-replace genome editing without double-strand breaks or donor DNA, Nature. 2019 Oct. 21. doi: 10.1038/s41586-019-1711-4, which is incorporated by reference herein in its entirety.

[0259] The IsrB polypeptide nuclease may be used to prime-edit a single nucleotide on a target DNA. Alternatively or additionally, the IsrB polypeptide nuclease may be used to prime-edit at least 2, at least 3, at least 4, at least 5, at least 6, at least 7, at least 8, at least 10, at least 11, at least 12, at least 13, at least 14, at least 15, at least 16, at least 17, at least 18, at least 19, at least 20, at least 21, at least 22, at least 23, at least 24, at least 25, at least 26, at least 27, at least 28, at least 29, at least 30, at least 40, at least 50, at least 60, at least 70, at least 80, at least 90, at least 100, at least 200, at least 300, at least 400, at least 500, at least 600, at least 700, at least 800, at least 900, or at least 1000 nucleotides on a target DNA.

[0260] In yet another embodiment, PRIME editing is used first to create a longer 3′ region (e.g. 20 nucleotides). Examples of prime editing systems and methods include those described in Anzalone A V et al., Search-and-replace genome editing without double-strand breaks or donor DNA, Nature. 2019 Oct. 21. doi: 10.1038/s41586-019-1711-4, which is incorporated by reference herein in its entirety. In such cases, the system comprises a IsrB polypeptide with nickase activity, a reverse transcriptase domain, and a DNA polymerase, and a ωRNA comprising a binding sequence capable of hybridizing to the target polynucleotide and a editing sequence. The generated region may be further extended on a DNA template as described herein. The latter may allow generation of a target-independent sequence, compatible with a generic donor sequence.

[0261] In some variations, a second IsrB polypeptide-mediated cleavage in vicinity to the target site may be made, which may enable more efficient invasion of the extended DNA.

[0262] In some examples, the compositions and systems of the IsrB polypeptide herein comprise: a reverse transcriptase (RT) polypeptide connected to or otherwise capable of forming a complex with the IsrB polypeptide; a first ωRNA capable of forming a first IsrB polypeptide-Reverse transcriptase complex with the IsrB polypeptide and comprising: a ωRNA capable of directing site-specific binding of the first IscB polypeptide-Reverse transcriptase complex to a first target sequence of a target polynucleotide; a first binding site region capable of binding to a cleaved or nicked strand of the target polynucleotide; and a RT template sequence encoding a first extended sequence; a second RNA capable of forming a second IsrB polypeptide-Reverse transcriptase complex with the IsrB polypeptide and comprising: a ωRNA capable of directing site specific binding of the second IsrB polypeptide-Reverse transcriptase complex to a second target sequence of the target polynucleotide; a second binding site region capable of binding to a cleaved or nicked strand of the target polynucleotide; and a RT template sequence encoding a second extended sequence.

[0263] In some cases, the compositions and systems may further comprise: a donor template; a third @ RNA capable of forming a IsrB polypeptide-Reverse transcriptase complex-ωRNA with the IsrB polypeptide and comprising: a ωRNA sequence capable of directing site-specific binding to a target sequence on the donor template; a third binding region capable of binding to a cleaved or nicked strand of the donor template; and a RT template encoding a third extended region complementary to the first extended region generated on the target polynucleotide; and a fourth ωRNA sequence capable of forming a IsrB polypeptide-Reverse transcriptase complex with the IsrB polypeptide and comprising: a ωRNA sequence capable of directing site-specific binding to a second target sequence on the donor template; a fourth binding region capable of binding to a cleaved or nicked strand of the donor template; and a RT template encoding a fourth extended region complementary to the second extended region generated on the target polynucleotide.

[0264] In some cases, the compositions and systems may further comprise a site-specific recombinase, and wherein the first and second extended regions are complementary to each other and introduce a serine integrase recombination site; and a donor molecule comprising a donor sequence for insertion into the target polypeptide and the complementary recombination site to the serine integrase recombination site.

[0265] In some examples, the compositions and systems may further comprise a recombinase. The recombinase is connected to or otherwise capable of forming a complex with the IsrB polypeptide. In an embodiment, the complex is capable of inserting a recombination site in the DNA loci of interest by extension of RT templates that encode for the recombination site on the 3′ extension of the @ RNA sequences by the reverse transcriptase. In an embodiment, a donor template comprising a compatible recombination site is provided that can recombine unidirectionally with the inserted recombination site when a recombinase specific for the recombination site is also provided. In an embodiment, the donor template is a plasmid comprising the complementary recombination site and any sequence for insertion at the DNA loci of interest. In an embodiment, the recombinase is connected to or capable of forming a complex with the IsrB polypeptide, such that all of the enzymatic proteins are brought into contact at the loci of interest. In an embodiment, the recombinase is codon optimized for eukaryotic cells (described further herein). In an embodiment, the recombinase includes a NLS (described further herein). In an embodiment, the recombinase is provided as a separate protein. The separate recombinase may form a dimer and bind to the donor template recombination site. The recombinase may be targeted to the loci of interest as a result of the insertion of the compatible recombination site that is also recognized by the recombinase. Thus, the recombinase may recognize the recombination site inserted at the DNA loci of interest and the recombination site on the donor and be targeted to the DNA loci of interest without any additional modifications to the recombinase.

[0266] In an embodiment, a second IsrB complex connected to a recombinase is targeted to the DNA loci of interest. In an embodiment, the second IsrB complex comprises a dead IsrB protein (dIsrB, described further herein), such that the recombinase is targeted to the DNA loci of interest, but the target sequence is not further cleaved. In an embodiment, the dIsrB targets a sequence generated only after the insertion of the recombination site. In an embodiment, the recombinase recognizes and binds to the donor template recombination site and the inserted recombination site. In an embodiment, the recombinase forms a dimer with a recombinase provided as a separate protein.

[0267] As used herein, the term “Recombinase” refers to an enzyme that catalyzes recombination between two or more recombination sites (e.g., an acceptor and donor site). Recombinases useful in the present invention catalyze recombination at specific recombination sites which are specific polynucleotide sequences that are recognized by a particular recombinase. “Uni-directional recombinases” or “integrases” refer to recombinase enzymes whose recognition sites are destroyed after the recombination has taken place. The term “integrase” refers to a type of recombinase. In other words, the sequence recognized by the recombinase is changed into one that is not recognized by the recombinase upon recombination. As a result, once a sequence is subjected to recombination by the uni-directional recombinase, the continued presence of the recombinase cannot reverse the previous recombination event.

[0268] “Recombination sites” are specific polynucleotide sequences that are recognized by the recombinase enzymes described herein. Typically, two different sites are involved (in regards to recombination termed “complementary sites”), one present in the target nucleic acid (e.g., a chromosome or episome of a eukaryote) and another on the nucleic acid that is to be integrated at the target recombination site. The terms “attB” and “attP,” which refer to attachment (or recombination) sites originally from a bacterial target (attachment site of bacteria) and a phage donor (attachment site of phage), respectively, are used herein although recombination sites for particular enzymes may have different names. The two attachment sites can share as little sequence identity as a few base pairs. The recombination sites typically include left and right arms separated by a core or spacer region. Thus, an attB recombination site consists of BOB′, where B and B′ are the left and right arms, respectively, and O is the core region. Similarly, attP is POP′, where P and P′ are the arms and O is again the core region. Upon recombination between the attB and attP sites, and concomitant integration of a nucleic acid at the target, the recombination sites that flank the integrated DNA are referred to as “attL” and “aatR.” The attL and attR sites, using the terminology above, thus consist of BOP′ and POB′, respectively. In some representations herein, the “O” is omitted and attB and attP, for example, are designated as BB′ and PP′, respectively.

### Guided Transposition Systems

[0269] Embodiments disclosed herein provide an engineered or non-natural guided transposition system. The engineered or non-natural guided transposition system may comprise one or more components of a IsrB system and one or more components of a Class II transposon. The components of the @ RNA-IsrB system can direct the Class II transposon component(s) to retrotransposon to a target nucleic acid sequence and direct its transposition into a recipient polynucleotide.

[0270] For example, the engineered or non-natural guided transposition systems that can include (a) a first IsrB polypeptide; (b) a first Class II transposon polypeptide coupled to or otherwise capable of complexing with the first IsrB polypeptide; (c) a first guide molecule capable of forming a first ωRNA-IsrB complex with the first IsrB protein and directing site-specific binding to a first target sequence of a first target polynucleotide; (d) a second IsrB polypeptide; (e) a second Class II transposon polypeptide coupled to or otherwise capable of complexing with the second IsrB polypeptide; (f) a second guide molecule capable of forming a second @ RNA-IsrB complex with the first IsrB protein and directing site-specific binding to a second target sequence of the first target polynucleotide; and (g) a Class II transposon polynucleotide comprising the first target polynucleotide and is capable of forming a complex with the first and second IsrB polypeptide, the first and second guide molecules, and the first and second Class II transposon polypeptides.

[0271] In one embodiment, the engineered or non-natural guided excision-transposition system can include (h) a third guide molecule capable of complexing with the first IsrB polypeptide and directing site-specific binding to a first target sequence of a second target polynucleotide, wherein the third guide molecule is optionally coupled to the first IsrB polypeptide; (i) optionally, a first ωRNA polynucleotide that encodes the third ωRNA; (j) a fourth ωRNA capable of complexing with the second IsrB polypeptide and directing site-specific binding to a second target sequence of the second target polynucleotide, wherein the fourth guide molecule is optionally coupled to the second IsrB polypeptide; and (k) optionally, a second ωRNA polynucleotide that encodes the fourth ωRNA.

[0272] In one embodiment, the first and the second Class II transposon polypeptides are capable of excising the first target polynucleotide from the Class II transposon polynucleotide. In one embodiment, the first and the second Class II transposon polypeptides are capable of transposing the first target polynucleotide in the second target polynucleotide. In one embodiment, the first target polynucleotide does not include one or more Class II transposon long terminal repeats.

[0273] The engineered or non-natural guided excision-transposition systems described herein can be based on a Class II transposon or Class II transposon system. The engineered or non-natural guided excision-transposition system may include a first target polynucleotide, also referred to as a donor polynucleotide or transposon and a second target polynucleotide, which is also referred to herein as a recipient polynucleotide. As used herein, “transposon” (also referred to as transposable element) refers to a polynucleotide sequence that is capable of moving form location in a genome to another. There are several classes of transposons. Transposons include retrotransposons (Class I transposons) and DNA transposons (Class II transposons). In some cases, retrotransposons require the transcription of the polynucleotide that is moved (or transposed) in order to transpose the polynucleotide to a new genome or polynucleotide. DNA transposons are those that do not require reverse transcription of the polynucleotide that is moved (or transposed) in order to transpose the polynucleotide to a new genome or polynucleotide.

[0274] Any suitable transposon system can be used. Suitable transposon and systems thereof can include, but are not limited, to Sleeping Beauty transposon system (Tcl/mariner superfamily) (see e.g. Ivics et al. 1997. Cell. 91 (4): 501-510), piggyBac (piggyBac superfamily) (see e.g. Li et al. 2013 110 (25): E2279-E2287 and Yusa et al. 2011. PNAS. 108 (4): 1531-1536), Tol2 (superfamily hAT), Frog Prince (Tcl/mariner superfamily) (see e.g. Miskey et al. 2003 Nucleic Acid Res. 31 (23): 6873-6881) and variants thereof.

[0275] In one embodiment, the first and/or second Class II transposon polypeptide is a DD[E/D] transposon or transposon polypeptide. In one embodiment, the first and/or the second Class II transposon polynucleotide is a Tcl/mariner, PiggyBac, Frog Prince, Tn3, Tn5, hAT, CACTA, P, Mutator, PIF/Harbinger, Transib, or a Merlin/IS1016 transposon polynucleotide. In one embodiment, the first and/or second Class II transposon polypeptide is a Tcl/mariner, PiggyBac, Frog Prince, Tn3, Tn5, hAT, CACTA, P, Mutator, PIF/Harbinger, Transib, or a Merlin/IS1016 transposon polypeptide.

[0276] Suitable Class II transposon systems and components that can be utilized can also be and are not limited to those described in e.g. and without limitation, Han et al., 2013. BMC Genomics. 14:71, doi: 10.1186/1471-2164-14-71, Lopez and Garcia-Perez. 2010. Curr. Genomics. 11 (2): 115-128; Wessler. 2006. PNAS. 103 (47): 176000-17601; Gao et al., 2017. Marine Genomics. 34:67-77; Bradic et al. 2014. Mobile DNA. 5 (12) doi: 10.1186/1759-8753-5-12; Li et al., 2013. PNAS. 110 (25) E2279-E2287; Kebriaei et al. 2017. Trends in Genetics. 33 (11): 852-870); Miskey et al. 2003. Nucleic Acid res. 31 (23): 6873-6881; Nicolas et al. 2015. Microbiol Spectr. 3 (4) doi: 10.1128/microbiolspec.MDNA3-0060-2014); W.S. Reznikoff. 1993. Annu Rev. Microbiol. 47:945-963; Rubin et al. 2001. Genetics. 158 (3): 949-957; Wicker et al. 2003. Plant Physiol. 132 (1): 52-63; Majumdar and Rio. 2015. Microbiol. Spectr. 3 (2) doi: 10.1128/microbiolspec.MDNA3-0004-2014; D. Lisch. 2002. Trends in Plant Sci. 7 (11): 498-504; Sinzelle et al. 2007. PNAS. 105 (12): 4715-4720; Han et al. 2014; Genome Biol. Evol. 6 (7): 1748-1757; Grzebelus et al. 2006; Mol. Genet. Genomics. 275 (5): 450-459; Zhang et al. 2004. Genetics. 166 (2): 971-986; Chen and Li. 2008. Gene. 408 (1-2): 51-63; and C. Feschotte. 2004. Mol. Biol. Evol. 21 (9): 1769-1780.

### Retrotransposons

[0277] The systems and compositions herein may comprise a IsrB polypeptide nuclease, one or more ωRNAs, and one or more components of a retrotransposon, e.g., a non-LTR retrotransposon. The one or more components of a retrotransposon include a retrotransposon protein and retrotransposon RNA. The systems and compositions may be used to insert a donor polynucleotide to a target polynucleotide. The systems and compositions may further comprise a donor polynucleotide.

[0278] In some examples, the present disclosure provides an engineered, non-naturally occurring composition comprising: a IsrB polypeptide nuclease, a non-LTR retrotransposon protein associated with or otherwise capable of forming a complex with the IsrB polypeptide nuclease; a single ωRNA capable of forming a complex with the IsrB polypeptide nuclease and directing site-specific binding to a target sequence of a target polynucleotide. The composition may further comprise a donor construct comprising a donor polynucleotide for insertion to the target polynucleotide and located between two binding elements capable of forming a complex with the non-LTR retrotransposon protein. In some cases, the IsrB polypeptide nuclease is engineered to have improved nickase activity.

[0279] In some examples, the IsrB polypeptide nuclease is fused to the N-terminus of the non-LTR retrotransposon protein. In some examples, the IsrB polypeptide nuclease is fused to the C-terminus of the non-LTR retrotransposon protein.

[0280] The guides may direct the fusion protein to a target sequence 5′ of the targeted insertion site, and wherein the IsrB polypeptide nuclease generates a double-strand break at the targeted insertion site. The guides may direct the fusion protein to a target sequence 3′ of the targeted insertion site, and wherein the IsrB polypeptide nuclease generates a double-strand break at the targeted insertion site.

[0281] The donor polynucleotide may further comprise a polymerase processing element to facilitate 3′ end processing of the donor polynucleotide sequence. The polymerase may be a DNA polymerase, e.g., DNA polymerase I. In some examples, the polymerase may be an RNA polymerase.

[0282] In some examples, the donor polynucleotide further comprises a homology region to the target sequence on the 5′ end of the donor construct, the 3′ end of the donor construct, or both. In some examples, the homology region is from 1 to 50, from 5 to 30, from 8 to 25, e.g., 1, 2, 3, 4, 5, 6, 7, 8, 9, 10, 11, 12, 13, 14, 15, 16, 17, 18, 19, 20, 21, 22, 23, 24, 25, 26, 27, 28, 29, 30, 31, 32, 33, 34, 35, 36, 37, 38, 39, 40, 41, 42, 43, 44, 45, 46, 47, 48, 49, or 50 base pairs in length.

[0283] Native or wild-type non-LTR retrotransposons encode the protein machinery necessary for their self-mobilization. The non-LTR retrotransposon element comprises a DNA element integrated into a host genome. This DNA element may encode one or two open reading frames (ORFs). For example, the R2 element of Bombyx mori encodes a single ORF containing reverse transcriptase (RT) activity and a restriction enzyme-like (REL) domain. L1 elements encode two ORFs, ORF1 and ORF2. ORF1 contains a leucine zipper domain involved in protein-protein interactions and a C-terminal nucleic acid binding domain. ORF2 has a N-terminal apurinic/apyrimidinic endonuclease (APE), a central RT domain, and a C-terminal cysteine histidine rich domain. An example replicative cycle of a non-LTR retrotransposon may comprise transcription of the full-length retrotransposon element to generate an mRNA active element (retrotransposon RNA). The active element mRNA is translated to generate the encoded retrotransposon proteins or polypeptides. A ribonucleoprotein complex comprising the active element and retrotransposon protein or polypeptide is formed and this RNP facilitates integration of the active element into the genome. The RNA-transposase complex nicks the genome. The 3′ end of the nicked DNA serves as a primer to allow the reverse transcription of the transposon RNA into cDNA. Fourth, the transposase proteins integrate the cDNA into the genome.

[0284] Elements of these systems may be engineered to work within the context of the invention. For example a non-LTR retrotransposon polypeptide may be fused to a site-specific nuclease. The binding elements that allow a non-LTR retrotransposon polypeptide to bind to the native retrotransposon DNA element, may be engineered into a donor construct to facilitate entry of a donor polynucleotide sequence into a target polypeptide.

[0285] In the present invention the protein component of the non-LTR retrotransposon may be connected to or otherwise engineered to form a complex with a site-specific nuclease. The retrotransposon RNA may be engineered to encode a donor polynucleotide sequence. Thus, in certain example embodiments, the IscB polypeptide nuclease, via formation of a IscB polypeptide nuclease complex with a guide sequence, directs the retrotransposon complex (e.g. the retrotransposon polypeptide(s) and retrotransposon RNA to a target sequence in a target polynucleotide, where the retrotransposon RNP complex facilitates integration of the donor polynucleotide sequence into the target polynucleotide. Accordingly, the one or more non-LTR retrotransposon components may comprise retrotransposon polypeptides, or function domains thereof, that facilitate binding of the retrotransposon RNA, reverse transcription of the retrotransposon RNA into cDNA, and/or integration of the donor polynucleotide into the target polynucleotide, as well as retrotransposon RNA elements modified to encode the donor polynucleotide sequence.

[0286] Examples of non-LTR retrotransposons include CRE, R2, R4, L1, RTE, Tad, R1, LOA, I, Jockey, CR1. In one example, the non-LTR retrotransposon is R2. In another example, the non-LTR retrotransposon is L1. Examples of non-LTR retrotransposons may include those described in Christensen S M et al., RNA from the 5′ end of the R2 retrotransposon controls R2 protein binding to and cleavage of its DNA target site, Proc Natl Acad Sci USA. 2006 Nov. 21; 103 (47): 17602-7; Eickbush T H et al, Integration, Regulation, and Long-Term Stability of R2 Retrotransposons, Microbiol Spectr. 2015 April; 3 (2): MDNA3-0011-2014. doi: 10.1128/microbiolspec.MDNA3-0011-2014; Han J S, Non-long terminal repeat (non-LTR) retrotransposons: mechanisms, recent developments, and unanswered questions, Mob DNA. 2010 May 12; 1 (1): 15. doi: 10.1186/1759-8753-1-15; Malik H S et al., The age and evolution of non-LTR retrotransposable elements, Mol Biol Evol. 1999 June; 16 (6): 793-805, which are incorporated by reference herein in their entireties.

[0287] Examples of the non-LTR retrotransposon polypeptides also include R2 from Clonorchis sinensis, or Zonotrichia albicollis.

[0288] A non-LTR retrotransposon may comprise multiple retrotransposon polypeptides or polynucleotides encoding same. In one embodiment, the retrotransposon polypeptides may form a complex. For example, a non-LTR retrotransposon is a dimer, e.g., comprising two retrotransposon polypeptides forming a dimer. The dimer subunits may be connected or form a tandem fusion. A IscB polypeptide nuclease may be associate with (e.g., connected to) one or more subunits of such complex. In some examples, the non-LTR retrotransposon is a dimer of two retrotransposon polypeptides; one of the retrotransposon polypeptides comprises nuclease or nickase activity and is connected with a IscB polypeptide nuclease.

[0289] The retrotransposon polypeptides may comprise one or more modifications to, for example, enhance specificity or efficiency of donor polynucleotide recognition, target-primed template recognition (TPTR). The retrotransposon polypeptides may also comprise one or more truncations or excisions to remove domains or regions of wild-type protein to arrive at a minimal polypeptide that retain donor polynucleotide recognition and TPTR. In some example embodiments, the native endonuclease activity may be mutated to eliminate endonuclease activity.

[0290] In certain example embodiments, the modifications or truncations of the non-LTR retrotransposon peptide may be in a zinc finger region, a Myb region, a basic region, a reverse transcriptase domain, a cysteine-histidine rich motif, or an endonuclease domain.

[0291] A non-LTR retrotransposon may comprise polynucleotide encoding one or more retrotransposon RNA molecules. The polynucleotide may comprise one or more regulatory elements. The regulatory elements may be promoters. The regulatory elements and promoters on the polynucleotides include those described throughout this application. For example, the polynucleotide may comprise a pol2 promoter, a pol3 promoter, or a T7 promoter.

[0292] In some cases, the polynucleotide encodes a retrotransposon RNA with at least a portion of its sequence complementary to a target sequence. For example, the 3′ end of the retrotransposon RNA may be complementary to a target sequence. The RNA may be complementary to a portion of a nicked target sequence. In one embodiment, a retrotransposon RNA may comprise one or more donor polynucleotides. In certain cases, a retrotransposon RNA may encode one or more donor polynucleotides.

[0293] A retrotransposon RNA may be capable of binding to a retrotransposon polypeptide. Such retrotransposon RNA may comprise one or more elements for binding to the retrotransposon polypeptide. Examples of binding elements include hairpin structures, pseudoknots (e.g., a nucleic acid secondary structure containing at least two stem-loop structures in which half of one stem is intercalated between the two halves of another stem), stem loops, and bulges (e.g., unpaired stretches of nucleotides located within one strand of a nucleic acid duplex). In certain examples, the retrotransposon RNA comprises one or more hairpin structures. In some examples, the retrotransposon RNA comprises one or more pseudoknots. In certain examples, a retrotransposon RNA comprises a sequence encoding a donor polynucleotide and one or more binding elements for forming a complex with the retrotransposon polypeptide. The binding elements may be located on the 5′ end or the 3′ end.

[0294] In one embodiment, a retrotransposon RNA comprises a region capable of hybridizing with an overhang of a target polynucleotide at the target site. The overhang may be a stretch of single-stranded DNA. The overhang may function as a primer for reverse transcription of at least a portion of the retrotransposon RNA to a cDNA. In some cases, a region of the cDNA may be capable of hybridizing a second overhang of the target polynucleotide. The second overhang may function as a primer for the synthesis of a second strand to generate a double-stranded cDNA. The cDNA may comprise a donor polynucleotide sequence. The two overhangs may be from different strands of the target polynucleotide.

### Reverse Transcriptase Domain

[0295] The one or more functional domains may be one or more reverse transcriptase domains. In one embodiment, the systems comprise an engineered system for modifying a target polynucleotide comprising: a IscB polypeptide or CRISPR-associated IscB polypeptide or a variant thereof (e.g., dIscB); a reverse transcriptase (RT) domain; a RNA template comprising or encoding a donor polynucleotide to be inserted to a target sequence of the target polynucleotide; and an ωRNA or guide RNA molecule (i.e., a naturally single guide RNA molecule comprising a scaffold for reprogramming).

[0296] The reverse transcriptase may generate single-strand DNA based on the RNA template. The single-strand DNA may be generated by a non-retron, retron, or diversity generating retroelement (DGR). In some examples, the single-strand DNA may be generated from a self-priming RNA template. A self-priming RNA template may be used to generate a DNA without the need of a separate primer.

[0297] A reverse transcriptase domain may be a reverse transcriptase or a fragment thereof. A wide variety of reverse transcriptases (RT) may be used in alternative embodiments of the present invention, including prokaryotic and eukaryotic RT, provided that the RT functions within the host to generate a donor polynucleotide sequence from the RNA template. If desired, the nucleotide sequence of a native RT may be modified, for example using known codon optimization techniques, so that expression within the desired host is optimized. A reverse transcriptase (RT) is an enzyme used to generate complementary DNA (cDNA) from an RNA template, a process termed reverse transcription. Reverse transcriptases are used by retroviruses to replicate their genomes, by retrotransposon mobile genetic elements to proliferate within the host genome, by eukaryotic cells to extend the telomeres at the ends of their linear chromosomes, and by some non-retroviruses such as the hepatitis B virus, a member of the Hepadnaviridae, which are dsDNA-RT viruses. Retroviral RT has three sequential biochemical activities: RNA-dependent DNA polymerase activity, ribonuclease H, and DNA-dependent DNA polymerase activity. Collectively, these activities enable the enzyme to convert single-stranded RNA into double-stranded cDNA. In an embodiment, the RT domain of a reverse transcriptase is used in the present invention. The domain may include only the RNA-dependent DNA polymerase activity. In some examples, the RT domain is non-mutagenic, i.e., does not cause mutation in the donor polynucleotide (e.g., during the reverse transcriptase process). In some examples, the RT domain may be non-retron RT, e.g., a viral RT or a human endogenous RT. In some examples, the RT domain may be retron RT or DGRs RT. In some examples, the RT may be less mutagenic than a counterpart wildtype RT. In one embodiment, the RT herein is not mutagenic.

### Retrons

[0298] In an embodiment, a donor template for homologous recombination is generated by use of a self-priming RNA template for reverse transcription. A non-limiting example of a self-priming reverse transcription system is the retron system. By the term “retron” it is meant a genetic element which encodes components enabling the synthesis of branched RNA-linked single stranded DNA (msDNA) and a reverse transcriptase. Retrons which encode msDNA are known in the art, for example, but not limited to U.S. Pat. Nos. 6,017,737; 5,849,563; 5,780,269; 5,436,141; 5,405,775; 5,320,958; CA 2,075,515; all of which are herein incorporated by reference.

[0299] In an embodiment, the reverse transcriptase domain is a retron RT domain. In an embodiment, the RNA template encodes a retron RNA template that is recognized and reverse transcribed by the retron reverse transcriptase domain. Conserved across many bacterial species, retrons are highly efficient reverse transcription systems of relatively unknown function. The retron system consists of the retron RT protein, as well as the msr and msd transcripts, which function as the primer and template sequences, respectively. All components of the retron system are expressed from a single open reading frame as a single transcript including the msr-msd and encoding the retron RT protein (Lampson, et al., 2005, Retrons, msDNA, and the bacterial genome. Cytogenet Genome Res 110:491-499). The msr element ORF of a retron provides for the RNA portion of the msDNA molecule, while the msd element ORF provides for the DNA portion of the msDNA molecule. The primary transcript from the msr-msd region is thought to serve as both a template and a primer to produce the msDNA. Synthesis of msDNA is primed from an internal rG residue of the RNA transcript using its 2′-OH group. Modification of msd, or msr may also be made to permit insertion of a RNA template encoding a donor polynucleotide within the msd without altering the functioning of or the production of msDNA. The RNA template encoding a donor polynucleotide sequence may be any length but is preferably less than about 5 kb nucleotides, or also less than about 2 kb, or also less than 500 bases, provided that an msDNA product is produced.

### Diversity Generating Retroelements (DGRS)

[0300] In an embodiment, the one or more functional domains may be a diversity generating retroelement(s) (e.g., DGR described in US20100041033A1). In one embodiment, the DGR may insert a donor polynucleotide with its homing mechanism. For example, the DGR may be associated with a catalytically inactive IscB protein (e.g., a dead IscB), and integrate the single-strand DNA using a homing mechanism. In some examples, the DGR may be less mutagenic than a counterpart wild type DGR. In some examples, the DGR is not error-prone. In one embodiment, the DGR herein is not mutagenic. The non-mutagenic DGR may be a mutant of a wild type DGR. As used herein, the term “DGR” encompasses both diversity generating retroelement polynucleotides and proteins encoded by diversity generating retroelement polynucleotides. In some examples, DGR may be proteins encoded by diversity generating retroelement polynucleotides having reverse transcriptase activity. In some examples, DGR may be proteins encoded by diversity generating retroelement polynucleotides having reverse transcriptase activity and integrase activity. In some cases, the template or donor polynucleotide may be encoded by a diversity generating retroelement polynucleotide. In certain cases, the template may be a polynucleotide different from the diversity generating retroelement polynucleotide, e.g., provided as a separate construct or molecule.

[0301] In one embodiment, the DGR herein may also include a Group II intron (and any proteins and polynucleotides encoded), which are mobile ribozymes that self-splice from precursor RNAs to yield excised intron lariat RNAs, which then invade new genomic DNA sites by reverse splicing. Examples of Group II intron include those described in Lambowitz A M et al., Group II Introns: Mobile Ribozymes that Invade DNA, Cold Spring Harb Perspect Biol. 2011 August; 3 (8): a003616.

[0302] In one embodiment, the diversity-generating retroelements (DGRs) are genetic elements that can produce targeted, massive variations in the genomes that carry these elements. In one embodiment, the DGR systems rely on error-prone reverse transcriptases to produce mutagenized cDNA (containing A-to-N mutations) from a template region (TR), to replace a segment called a variable region (VR) that is similar to the TR region—this process is called mutagenic retrohoming (see, e.g., Sharifi and Ye, MyDGR: a server for identification and characterization of diversity-generating retroelements. Nucleic Acids Res. 2019 Jul. 2; 47 (W1): W289-W294). DGRs may include a unique family of retroelements that generate sequence diversity of DNA. They exist widely in bacteria, archaea, phage and plasmid, and benefit their hosts by introducing variations and accelerating the evolution of target proteins (see, e.g., Yan et al., Discovery and characterization of the evolution, variation and functions of diversity-generating retroelements using thousands of genomes and metagenomes. BMC Genomics. 2019; 20:595). The first DGR was discovered in a Bordetella phage, BPP-1. Bordetella causes the respiratory infection in humans and many other mammals, controlled by the BvgAS signal transduction system. The surface of Bordetella is highly variable owing to the dynamic gene expression in the infectious cycle. The invasion of BPP-1 to Bordetella relies on the phage tail fiber protein Mtd. With the process of mutagenic reverse transcription and cDNA integration, DGR may introduce multiple nucleotide substitutions to Mtd gene and generates different receptor-binding molecules, thus making BPP-1 the ability to invade Bordetellae with diverse cell surfaces.

[0303] The systems may be used to generate an ssDNA donor using a retron- or DGR RT, which is then integrated by homologous recombination upon target cleavage or nicking using a IscB nuclease. In one embodiment, the systems may comprise DGRs and/or Group-II intron reverse transcriptases. The homing mechanism of DGRs or Group-II introns may be used in modifying a target polynucleotide. The DGRs or Group-II introns reverse transcriptase may be guided to a target polynucleotide by tethering to a nuclease-dead IscB nuclease, TALE, or ZF protein. In another embodiment, a non-retron/DGR reverse transcriptase (e.g. a viral RT) may be used for generating cDNA off of a self-priming RNA. In one embodiment, a ssDNA may be generated by an RT, but integrate it using a dead IscB polypeptide or CRISPR-associated IscB polypeptide, creating an accessible R-loop instead of nicking/cleaving.

### Topoisomerases

[0304] The one or more functional domains may be one or more topoisomerase domains. In one embodiment, an engineered system for modifying a target polynucleotide comprising: a IsrB polypeptide; a topoisomerase domain; and a nucleic acid template comprising or encoding a donor polynucleotide to be inserted to a target sequence of the target polynucleotide. In some examples, two or more of: the IsrB polypeptide; topoisomerase domain; and nucleic acid template may form a complex. In some examples, two or more of: the IsrB; topoisomerase domain, may be comprised in a fusion protein.

[0305] Topoisomerases are a class of enzymes that modify the topological state of DNA via the breakage and rejoining of nucleic acid strands. In some cases, a topoisomerase may be a DNA topoisomerase, which is an enzyme that controls and alters the topologic states of DNA during transcription, and catalyzes the transient breaking and rejoining of a single strand of DNA which allows the strands to pass through one another, thus altering the topology of DNA.

[0306] In one embodiment, the topoisomerase domain is capable of ligating the donor polynucleotide with the target polynucleotide. The ligation may be achieved by sticky end or blunt end ligation. In an example, the donor polynucleotide may comprise an overhang comprising a sequence complementary to a region of the target polynucleotide. Examples of ligating the donor polynucleotide with the target polynucleotide include those of TOPO cloning, e.g., those described in “The Technology Behind TOPO Cloning,” at www.thermofisher.com/us/en/home/life-science/cloning/topo/topo-resources/the-technology-behind-topo-cloning.html.

[0307] In one embodiment, the topoisomerase domain may be associated with the donor polynucleotide. For example, the topoisomerase domain is covalently linked to the donor polynucleotide.

[0308] In one embodiment, a topoisomerase domain may be provided together with, e.g., associated (e.g., fused) with a IsrB polypeptide. Alternatively or additionally, the topoisomerase domain may be on a molecule different from the IsrB polypeptide. In some cases, the topoisomerase domain may be associated with a donor polynucleotide. For example, the topoisomerase domain may be pre-loaded covalently with a donor DNA molecule. Such design may allow for efficient ligation of only a specific cargo. The topoisomerase domain may ligate the donor polynucleotide (e.g., a DNA molecule) to a target site on a target polynucleotide (e.g., a free double-stranded DNA end). In one embodiment, the donor polynucleotide may have an overhang that comprises a sequence complementary to a region of the target polynucleotide. For example, the overhang may invade into the target polynucleotide at a cut site generated by the IsrB polypeptide.

[0309] Examples of topoisomerases include type I, including type IA and type IB topoisomerases, which cleave a single strand of a double-stranded nucleic acid molecule, and type II topoisomerases (e.g., gyrases), which cleave both strands of a double-stranded nucleic acid molecule.

[0310] Type IA and IB topoisomerases cleave one strand of a double-stranded nucleic acid molecule. In some examples, the cleavage of a double-stranded nucleic acid molecule by type IA topoisomerases generates a 5′ phosphate and a 3′ hydroxyl at the cleavage site, with the type IA topoisomerase covalently binding to the 5′ terminus of a cleaved strand. Cleavage of a double-stranded nucleic acid molecule by type IB topoisomerases may generate a 3′ phosphate and a 5′ hydroxyl at the cleavage site, with the type IB topoisomerase covalently binding to the 3′ terminus of a cleaved strand.

[0311] Examples of Type IA topoisomerases include E. coli topoisomerase I, E. coli topoisomerase III, eukaryotic topoisomerase II, archeal reverse gyrase, yeast topoisomerase III, Drosophila topoisomerase III, human topoisomerase III, Streptococcus pneumoniae topoisomerase III, and the like, including other type IA topoisomerases. A DNA-protein adduct is formed with the enzyme covalently binding to the 5′-thymidine residue, with cleavage occurring between the two thymidine residues.

[0312] Examples of Type IB topoisomerases include the nuclear type I topoisomerases present in all eukaryotic cells and those encoded by Vaccinia and other cellular poxviruses. The eukaryotic type IB topoisomerases are exemplified by those expressed in yeast, Drosophila and mammalian cells, including human cells. Viral type IB topoisomerases are exemplified by those produced by the vertebrate poxviruses (Vaccinia, Shope fibroma virus, ORF virus, fowlpox virus, and molluscum contagiosum virus), and the insect poxvirus (Amsacta moorei entomopoxvirus).

[0313] Examples of Type II topoisomerases include, bacterial gyrase, bacterial DNA topoisomerase IV, eukaryotic DNA topoisomerase II, and T-even phage encoded DNA topoisomerases. Type II topoisomerases may have both cleaving and ligating activities. Substrate double-stranded nucleic acid molecules of type II topoisomerase can be prepared such that the type II topoisomerase can form a covalent linkage to one strand at a cleavage site. For example, calf thymus type II topoisomerase can cleave a substrate ds nucleic acid molecule containing a 5′ recessed topoisomerase recognition site positioned three nucleotides from the 5′ end, resulting in dissociation of the three nucleic acid molecule 5′ to the cleavage site and covalent binding of the topoisomerase to the 5′ terminus of the ds nucleic acid molecule. Furthermore, upon contacting such a type II topoisomerase-charged ds nucleic acid molecule with a second nucleic acid molecule containing a 3′ hydroxyl group, the type II topoisomerase can ligate the sequences together, and then is released from the recombinant nucleic acid molecule.

[0314] In some examples, the topoisomerase is DNA topoisomerase I, e.g., a Vaccinia virus topoisomerase I. The topoisomerase may be pre-loaded with a donor polynucleotide. The Vaccinia virus topoisomerase may need a target comprising a 5′—OH group.

### Phosphatases

[0315] The systems herein may further comprise a phosphatase domain. A phosphatase is an enzyme capable of removing a phosphate group from a molecule e.g., a nucleic acid such as DNA. Examples of phosphatases include calf intestinal phosphatase, shrimp alkaline phosphatase, Antarctic phosphatase, and APEX alkaline phosphatase.

[0316] In some examples, the 5′—OH group of in the target polynucleotide may be generated by a phosphatase. A topoisomerase compatible with a 5′ phosphate target may be used to generate stable loaded intermediates. In some cases, a IscB polypeptide or CRISPR-associated IscB polypeptide nuclease that leaves a 5′ OH after cleaving the target polynucleotide may be used. In some cases, the phosphatase domain may be associated with (e.g., fused to) the IscB protein. The phosphatase domain may be capable of generating a —OH group at a 5′ end of the target polynucleotide. The phosphatase may be delivered separated from other components in the system, e.g., as a separate protein, on a separate vector from other components.

### Polymerases

[0317] The systems herein may further comprise a polymerase domain. A polymerase refers to an enzyme that synthesizes chains of nucleic acids. The polymerase may be a DNA polymerase or an RNA polymerase.

[0318] In one embodiment, the systems comprise an engineered system for modifying a target polynucleotide comprising: a IsrB polypeptide; a DNA polymerase domain; and a DNA template comprising a donor polynucleotide to be inserted to a target sequence of the target polynucleotide. In some examples, two or more of: the IscB protein; DNA polymerase domain; and DNA template may form a complex. In some examples, two or more of: the IsrB protein; DNA polymerase domain; are comprised in a fusion protein. For example, the IsrB polypeptide and DNA polymerase domain may be comprised in a fusion protein.

[0319] In one embodiment, the systems may comprise a IsrB polypeptide nuclease (or variant thereof such as a dIsrB polypeptide and a DNA polymerase (e.g. phi29, T4, T7 DNA polymerase). The systems may further comprise a single-stranded DNA or double-stranded DNA template. The DNA template may comprise i) a first sequence homologous to a target site of the IscB protein on the target polynucleotide, and/or ii) a second sequence homologous to another region of the target polynucleotide. In one embodiment, the template may be a synthetic single-stranded or PCR-generated DNA molecule, (optionally end-protected by modified nucleotides), or a viral genome (e.g. AAV). In another embodiment, the template is generated using a reverse transcriptase. When the system is delivered into a cell, an endogenous DNA polymerase in the cell may be used. Alternatively or additionally, an exogenous DNA polymerase may be expressed in the cell.

[0320] The DNA template may be end-protected by one or more modified nucleotides, or comprises a portion of a viral genome. In some embodiment, the DNA template comprises LNA or other modifications (e.g., at the 3′ end). The presence of LNA and/or the modifications may lead to more efficient annealing with the 3′ flap generated by IscB polypeptide or CRISPR-associated IscB polypeptide cleavage.

[0321] Examples of DNA polymerase include Taq, Tne (exo-), Tma (exo-), Pfu (exo-), Pwo (exo-), Thermoanaerobacter thermohydrosulfuricus DNA polymerase, Thermococcus litoralis DNA polymerase I, E. coli DNA polymerase I, Taq DNA polymerase I, Tth DNA polymerase I, Bacillus stearothermophilus (Bst) DNA polymerase I, E. coli DNA polymerase III, bacteriophage T5 DNA polymerase, bacteriophage M2 DNA polymerase, bacteriophage T4 DNA polymerase, bacteriophage T7 DNA polymerase, bacteriophage phi29 DNA polymerase, bacteriophage PRD1 DNA polymerase, bacteriophage phi15 DNA polymerase, bacteriophage phi21DNA polymerase, bacteriophage PZE DNA polymerase, bacteriophage PZA DNA polymerase, bacteriophage Nf DNA polymerase, bacteriophage M2Y DNA polymerase, bacteriophage B103 DNA polymerase, bacteriophage SF5 DNA polymerase, bacteriophage GA-1 DNA polymerase, bacteriophage Cp-5 DNA polymerase, bacteriophage Cp-7 DNA polymerase, bacteriophage PR4 DNA polymerase, bacteriophage PR5 DNA polymerase, bacteriophage PR722 DNA polymerase and bacteriophage L17 DNA polymerase.

### Ligases

[0322] In general, the systems comprise a IsrB polypeptide and a ligase associated with the IscB protein. The IsrB polypeptide may be recruited to the target sequence by an ωRNA, and generate a break on the target sequence. The ωRNA may further comprise a template sequence with desired mutations or other sequence elements. The template sequence may be ligated to the target sequence to introduce the mutations or other sequence elements to the nucleic acid molecule. The IsrB polypeptide may be a nickase that generates a single-strand break on nucleic acid molecule, and the ligase may be a single-strand DNA ligase. In one embodiment, the systems comprise a pair of IsrB polypeptide-ligases complexed with two distinct ωRNA sequences. Each IsrB polypeptide ligase complex can target one strand of a double-stranded polynucleotide, and work together to effectively modify the sequence of the double-stranded polynucleotides.

[0323] In some examples, the IsrB polypeptide is associated with a ligase or functional fragment thereof. The ligase may ligate a single-strand break (a nick) generated by the IsrB polypeptide. In certain examples, the IsrB polypeptide is associated with a reverse transcriptase or functional fragment thereof.

[0324] The present invention further provides systems and methods of modifying a nucleic acid sequence using a pair of distinct IsrB polypeptide-ligase-@ RNA complexes, said systems and methods comprising: (a) an engineered IsrB polypeptide connected to or complexed with a ligase; (b) two distinct ωRNA sequences complexed with such IsrB polypeptide-ligase protein complex to form a first and a second distinct IsrB-ligase ωRNA complexes; (c) the first IsrB-ligase ωRNA complex binding to one strand of a target double-stranded polynucleotide sequence, and the second IsrB polypeptide-ligase-ωRNA complex binding to another strand of the target double-stranded polynucleotide sequence; (d) upon binding of the said complexes to the locus of interest the effector protein induces the modification of the sequences associated with or at the target locus of interest, whereby the two IsrB polypeptide-ligase-ωRNA complexes work together on different strands of the double-stranded target sequence and modify the sequence.

[0325] One of the advantages of using such a “pair” of IsrB polypeptide-ligase-ωRNA complexes includes high efficiency in modifying the sequence associated with or at the locus of interest of target double-stranded polynucleotides.

[0326] In one embodiment, the IsrB polypeptide can be a nickase. In a preferred embodiment, a ligase is linked to the IsrB polypeptide. The ligase can ligate the donor sequence to the target sequence. The ligase can be a single-strand DNA ligase or a double-strand DNA ligase. The ligase can be fused to the carboxyl-terminus of a IsrB polypeptide, or to the amino-terminus of a IsrB polypeptide.

[0327] As used herein the term “ligase” refers to an enzyme, which catalyzes the joining of breaks (e.g., double-stranded breaks or single-stranded breaks (“nicks”) between adjacent bases of nucleic acids. For example, a ligase may be an enzyme capable of forming intra- or inter-molecular covalent bonds between a 5′ phosphate group and a 3′ hydroxyl group. The term “ligate” refers to the reaction of covalently joining adjacent oligonucleotides through formation of an internucleotide linkage.

[0328] DNA ligases fall into two general categories: ATP-dependent DNA ligases (EC 6.5.1.1), and NAD (+) dependent DNA ligases (EC 6.5.1.2). NAD (+) dependent DNA ligases are found only in bacteria (and some viruses) while ATP-dependent DNA ligases are ubiquitous. The ATP-dependent DNA ligases can be divided into four classes: DNA ligase I, II, III, and IV. DNA ligase I links Okazaki fragments to form a continuous strand of DNA; DNA ligase II is an alternatively spliced form of DNA ligase III, found only in non-dividing cells; DNA ligase III is involved in base excision repair; and DNA ligase IV is involved in the repair of DNA double-strand breaks by non-homologous end joining (NHEJ). Amongst all ligases, there are two types of prokaryotic and one type of eukaryotic ligases that are particularly well suited for facilitating the blunt-ended, double-stranded DNA ligation: Prokaryotic DNA ligases (T3 and T4) and Eukaryotic DNA ligase (Ligase 1).

[0329] In some cases, the ligase is specific for double-stranded nucleic acids (e.g., dsDNA, dsRNA, RNA/DNA duplex). An example of a ligase specific for double-stranded DNA and DNA/RNA hybrids is T4 DNA ligase. In some cases, the ligase is specific for single-stranded nucleic acids (e.g., ssDNA, ssRNA). An example of such ligase is CircLigase II. In some cases, the ligase is specific for RNA/DNA duplexes. In some cases, the ligase is able to work on single-stranded, double-stranded, and/or RNA/DNA nucleic acids in any combination.

[0330] In some cases, the ligase may be a pan-ligase, which is a single ligase with the ability to ligate both DNA and RNA targets. The ligase may be specific for a target (e.g., DNA-specific or RNA-specific). In some cases, the ligase may be a dual ligase system that include DNA-specific, RNA-specific, and/or pan-ligases, in any combination.

[0331] Examples of ligases that can be used with the disclosure include T4 DNA Ligase, T3 DNA Ligase, T7 DNA Ligase, E. coli DNA Ligase, HiFi Taq DNA Ligase, 9° N™ DNA Ligase, Taq DNA Ligase, SplintR® Ligase (also known as. PBCV-1 DNA Ligase or Chlorella virus DNA Ligase), Thermostable 5′ AppDNA/RNA Ligase, T4 RNA Ligase, T4 RNA Ligase 2, T4 RNA Ligase 2 Truncated, T4 RNA Ligase 2 Truncated K227Q, T4 RNA Ligase 2, Truncated KQ, RtcB Ligase (joins single stranded RNA with a 3″-phosphate or 2′,3′-cyclic phosphate to another RNA), CircLigase II, CircLigase ssDNA Ligase, CircLigase RNA Ligase, or Ampligase® Thermostable DNA Ligas, NAD-dependent ligases including Taq DNA ligase, Thermus filiformis DNA ligase, Escherichia coliDNA ligase, Tth DNA ligase, Thermus scotoductus DNA ligase (I and II), thermostable ligase, Ampligase thermostable DNA ligase, VanC-type ligase, 9° N DNA Ligase, Tsp DNA ligase, and novel ligases discovered by bioprospecting; ATP-dependent ligases including T4 RNA ligase, T4 DNA ligase, T3 DNA ligase, T7 DNA ligase, Pfu DNA ligase, DNA ligase I, DNA ligase III, DNA ligase IV, and novel ligases discovered by bioprospecting, and wild-type, mutant isoforms, and genetically engineered variants thereof. In a particular example, the ligase is a

[0332] In one embodiment, the examples of the ligases include those used in sequencing by synthesis or sequencing by ligation reactions.

### Helitrons

[0333] The systems and compositions herein may comprise a IsrB polypeptide nuclease, one or more @ RNAs, and one or more components of a helitron. The systems and compositions may be used to insert a donor polynucleotide to a target polynucleotide. The systems and compositions may further comprise a donor polynucleotide.

[0334] The term “helitron”, as used herein, refers to a polynucleotide (or nucleic acid segment), recognized as a transposon that captures and mobilizes gene fragments in eukaryotes. The term “helitron” as used herein refers to transposase that comprises an endonuclease domain and a C-terminal helicase domain. Helitrons are rolling-circle RNA transposons. In one embodiment, the helitron encodes a 1400 to about 2000 amino acid, or about 1800 amino acid multidomain transposase. In embodiments, the helitron comprises a hairpin near the 3′end to function as a transposition terminator. In embodiments, the transposon comprises a RepHel motif comprising a replication initiator (Rep) and a DNA helicase (hel) domain. See, Thomas J. & Pritham E. J. Helitrons, the eukaryotic rolling-circle transposable elements. Microbiol. Spectr. 3, 893-926 (2015). In embodiments, the helitron comprises a Rep nuclease domain and C-terminal helicase domain and inserts between an AT dinucleotide in single strand DNA. In an aspect, the C-terminal helicase unwinds the DNA in a 5′ to 3′ direction. The HUH nuclease domain may comprise one or two active site tyrosine residues, in embodiments, is a 2 Tyrosine (Y2) HUH endonuclease domain. Helitrons can encompass helentron, proto-helentron and helitron2 type proteins, structures of which can be as described in Thomas et al., 2015 at FIGS. 1 and 3, incorporated specifically by reference. Particular organsisms in which the helitron or helentrons have been found can include those in Table 1 of Thomas J. & Pritham E. J. Helitrons, the eukaryotic rolling-circle transposable elements. Microbiol. Spectr. 3, 893-926 (2015), incorporated herein by reference. Similarly, helitrons can be identified based at least in part on the Rep motif, and conserved residues in the helitrons, and according to the alignment sequence of FIG. 2 of Thomas J. & Pritham E. J. Helitrons, the eukaryotic rolling-circle transposable elements. Microbiol. Spectr. 3, 893-926 (2015), specifically incorporated herein by reference.

[0335] The expression “helitron reaction” used herein refers to a reaction wherein a transposase inserts a donor polynucleotide sequence in or adjacent to an insertion site on a target polynucleotide. The insertion site may contain a sequence or secondary structure recognized by the helitron and/or an insertion motif sequence in the target polynucleotide into which the donor polynucleotide sequence may be inserted.

[0336] As described in Grabundzija 2018, the helitron terminal sequences contains a distinct ˜150 base pairs (bp) long sequence with an absolutely conserved dinucleotide at the end of left terminal sequence (LTS), and a tetranucleotide at the end of right terminal sequence (RTS) which is preceded by a palindromic sequence that can form a hairpin structure. Grabundzija et al., Nat. Commun. 2018; 9:1278; doi: 10.1035/s41467-018-03688-w.

[0337] The helitron end sequences may be responsible for identifying the donor polynucleotide for transposition. The helitron end sequences may be the DNA sequences used to perform a transposition reaction, the end sequences may be referred to herein as right terminal sequences and left terminal sequence. The donor polynucleotide can be configured to comprise a first and second helitron recognition sequence that are at least 80%, 85%, 90%, 95% 96%, 97%, 98%, 99% or 100% complementary to a left terminal sequence and/or a right terminal sequence of a polynucleotide encoding the helitron polypeptide.

[0338] In an aspect, the palindromic sequence may be located upstream of the right terminal sequence, for example, about 5, 10, 15, 20, 25, 30, 35 nucleotides upstream of the right terminal sequence end, or about 10 to 15 nucleotides upstream of the right terminal sequence end, about 10 to 12 nucleotides or about 11 nucleotides upstream of the right terminal sequence end. Ivana Grabundzija, Nat Commun. 2016; 7:10716, doi: 10.1038/ncomms10716, incorporated herein by reference.

[0339] Exemplary helitrons can be identified using software, for example (EAHelitron) that has been used to identify Helitrons in a wide range of plant genomes. See, Hu, K., Xu, K., Wen, J. et al. Helitron distribution in Brassicaceae and whole Genome Helitron density as a character for distinguishing plant species. BMC Bioinformatics 20, 354 (2019). doi: 10.1186/s12859-019-2945-8, incorporated herein by reference.

[0340] The helitron may be derived from a eukaryote. In an aspect, the helitron is derived from a mammalian genome, in an aspect, vespertilionid bats, e.g. Helibat. In embodiments, the helitron is derived from derived from a Helibat1 transposon. In embodiments, the helitron is Helraiser, the full DNA sequence of the consensus transposon, including left terminal and right terminal sequences as well as hairpin identified is provided in Grabundzija, 2016 at Supplementary FIG. 1, specifically incorporated herein by reference. In an aspect, the helitron is flanked by left and right terminal sequences of the transposon. In an aspect, the left terminal sequence and right terminal sequence terminates with the conserved 5′-TC/CTAG-3′ motif. In an embodiment, the helitron may comprise a palindromic sequence that is about 10 to about 35, or about 5-25 bp or about 19-bp-long palindromic sequence with the potential to form a hairpin structure.

[0341] Elements of these systems may be engineered to work within the context of the invention. For example, a helitron polypeptide may be fused to a polypeptide capable of generating an R-loop. Fusion may be by any appropriate linker, in an exemplary embodiment, XTEN16. The binding elements that allow a helitron polypeptide to bind, for example, the use of sequences complementary to the right terminal sequence and the left terminal sequence of the helitron may be engineered into a donor construct to facilitate entry of a donor polynucleotide sequence into a target polynucleotide.

[0342] In certain example embodiments, the Isc polypeptide, via formation of complex with a hRNA sequence, directs the helitron polypeptide to a target sequence in a target polynucleotide, where the helitron facilitates integration of a donor polynucleotide sequence into the target polynucleotide.

[0343] The helitron polypeptides may also comprise one or more truncations or excisions to remove domains or regions of wild-type protein to arrive at a minimal polypeptide, alter functionality according to the system in which the helitron is used, or mutated to enhance or diminish particular activities associated with the helitron, i.e. nuclease activity or helicase activity.

### IsrB Recombinase

[0344] The systems and compositions herein may comprise a IsrB polypeptide system, and one or more components of a recombinase. In an aspect, the IsrB polypeptide is naturally catalytically inactive and utilized with one or more nucleic acid components to provide site-specific targetings, and the one or more components of the recombinase to introduce a modification. In an aspect, the IsrB polypeptide polypeptide may be catalytically inactivated via mutation of one or more residues of a catalytic domain or via truncation, and utilized with one or more RNA components to provide site-specific targeting, and the one or more components of the recombinase introduce a modification. In an aspect, the IsrB polypeptide may be catalytically inactivated, and utilized with one or more RNA components to provide site-specific targeting, with the one or more components of the recombinase introduce a modification. In preferred embodiments, the recombinatise mediates unidirectional site-specific recombination. In one embodiment, the recombinase is a serine recombinase (SR), encoded, for example, by IS607 family, Tn4451, and bacteriophage phiC31. See, generally, Smith M C, Thorpe H M: Diversity in the serine recombinases. Mol Microbiol. 2002, 44:299-307. 10.1046/j. 1365-2958.2002.02891.x; Li et al., (2018) J. Mol. Biol. 430:21, 4401-4418. In an embodiment, the recombinase is a tyrosine recombinase (YR) encoded by IS91, Helitron, IS200/IS605, Crypton or DIRS-retrotransposon families. See, generally, Goodwin T J, Butler M I, Poulter R T: Cryptons: a group of tyrosine-recombinase-encoding DNA transposons from pathogenic fungi. Microbiology. 2003, 149:3099-3109. Doi: 10.1099/mic.0.26529-0; Cappello J, Handelsman K, Lodish H F: Sequence of Dictyostelium DIRS-1: an apparent retrotransposon with inverted terminal repeats and an internal circle junction sequence. Cell. 1985, 43:105-115. 10.1016/0092-8674 (85) 90016-9. In an aspect, the recombinase provides site-specific integration of a template that can be provided with the composition, e.g. a donor oligonucleotide. Without being bound by theory, the recombinase allows for integration independent of payload size and can coordinate strand exchange and re-ligation across multiple cell types, allowing integration of long stretches of polynucleotides. In an exemplary embodiment, the serine recombinase is PhiC31 and the target is DNA. In an aspect, the phiC31 allows for integration of a target site comprising an attP or pseudoattP recognition site. See, e.g. systembio.com/wp-content/uploads/phiC31_productsheet-1.pdf. In an embodiment utilizing phiC231, a donor oligonucleotide would be provided with an attB at sequence that facilitates attachment at the attP site of the target genome. Similar approaches of designing donor oligonucleotides with sequences complementary to attachment sites for a recombinase can be designed for use with the present invention. See, e.g. Li et al., (2018) J. Mol. Biol. 430:21, 4401-4418.

[0345] In one embodiment, a naturally inactive IsrB is provided with an IS630 transposon. IS630 transposons comprise the DDE motif, which is an RNase H-like fold that draws three catalytically active residues DDE signature and average about 1100 bp in length. See, Gao, B., Wang, Y., Diaby, M. et al. Evolution of pogo, a separate superfamily of IS630-Tcl-mariner transposons, revealing recurrent domestication events in vertebrates. Mobile DNA 11, 25 (2020) doi: 10.1186/s13100-020-00220-0. In an aspect, the IS630 transposon provides high target specificity inserting into a TA dinucleotide. In an aspect, the insertion is at a 5′-NTAN-3′.

[0346] The systems and compositions herein may comprise a IsrB polypeptide, and one or more components of an integrase. In an aspect, the IsrB polypeptide is naturally catalytically inactive or is a nickase and is utilized with one or more nucleic acid components to provide site-specific targeting, and the one or more components of the integrase to introduce a modification. In an aspect, the IsrB polypeptide may be catalytically inactivated via mutation of one or more residues of a catalytic domain (e.g. RuvC domain) or via truncation, and utilized with one or more RNA components to provide site-specific targeting, and the one or more components of the recombinase introduce a modification. In an aspect, the IscB polypeptide is a nickase, and utilized with one or more RNA components to provide site-specific targeting, with the one or more components of the integrase introduce a modification. In an embodiment, the IsrB polypeptide is naturally catalytically inactive, for example, SEQ ID NOs. 1445-1523. In one embodiment, a naturally inactive IsrB is provided with an integrase, and optionally a reverse transcriptase.

[0347] In preferred embodiments, the integrase mediates gene integration at diverse loci by directing insertion with an IsrB nickase fused to both a reverse transcriptase and an integrase. In one embodiment, the integrase is a serine integrase, encoded, for example, BxbINT. See, generally, Ioannidi et al., “Drag-and-drop genome insertion without DNA cleavage with CRISPR-directed integrases”; doi: 10.1101/2021.11.01.466786m incorporated herein by reference in its entirety. In Ioannidi, Gootenberg, Abudayyeh, and colleagues show integration using a CRISPR-Cas9 nickase fused to a reverse transcriptase and serine integrase termed Programmable Addition via Site-specific Targeting Elements (PASTE) with delivery via a single dose of plasmids with functionality in non-dividing and primary cells, utilizing a guide RNA comprising an AttB landing site, termed attachment site-containing guide RNA were used to insert sequences, including diverse cargo sequences that can be inserted across different loci, varying in size up to about 36 kb. Additional uses of the PASTE system included gene tagging, gene replacement, gene delivery, and protein production and secretion, approaches that are contemplated for use with the IscB nickase and integrase approach. In an aspect, the omega RNA may comprise an AttB landing site. In an aspect, the recombinase provides site-specific integration of a template that can be provided with the composition, e.g. a donor oligonucleotide.

[0348] Additional large serine integrases can be used with the IsrB polypeptide, e.g. IsrB nickase, for example, as identified and described in Durrant et al., Large-scale discovery of recombinases for integrating DNA into the human genome, doi: 10.1101/2021.11.05.467528, incorporated herein by reference. Other integrases include BceINT, SscINT, SacINT. See, Ioannidi, 2021 at and FIG. 6d, and FIG. 10a.

[0349] Without being bound by theory, the recombinase allows for integration independent of payload size and can coordinate strand exchange and re-ligation across multiple cell types, allowing integration of long stretches of polynucleotides. In an exemplary embodiment, the integrase is BxbINT and the target is DNA. In an aspect, the BxbINT allows for integration of a target site comprising an attP or pseudoattP recognition site. In an embodiment utilizing BxbINT, a donor oligonucleotide would be provided with an attB at sequence that facilitates attachment at the attP site of the target genome. Similar approaches of designing donor oligonucleotides with sequences complementary to attachment sites for an integrase can be designed for use with the present invention, for example a circular double-strand DNA template containing the AttP attachment site, or delivery of large cargo via an adenovirus or other viral vector, as described elsewhere herein. See, e.g. Ioannidi et al., 2021 at FIGS. 1a, 1b and 5b.

### Vectors Encoding IsrB Systems

[0350] The systems herein may comprise one or more polynucleotides. The polynucleotide(s) may comprise coding sequences of components of the systems herein, e.g., IsrB polypeptide nuclease, ωRNA(s), functional domain(s), donor polynucleotide(s), and/or other components in the systems. The present disclosure further provides vectors or vector systems comprising one or more polynucleotides herein. The vectors or vector systems include those described in the delivery sections herein.

[0351] The terms “polynucleotide”, “nucleotide”, “nucleotide sequence”, “nucleic acid” and “oligonucleotide” are used interchangeably. They refer to a polymeric form of nucleotides of any length, either deoxyribonucleotides or ribonucleotides, or analogs thereof. Polynucleotides may have any three-dimensional structure, and may perform any function, known or unknown. The following are non-limiting examples of polynucleotides: coding or non-coding regions of a gene or gene fragment, loci (locus) defined from linkage analysis, exons, introns, messenger RNA (mRNA), transfer RNA, ribosomal RNA, short interfering RNA (siRNA), short-hairpin RNA (shRNA), micro-RNA (miRNA), ribozymes, cDNA, recombinant polynucleotides, branched polynucleotides, plasmids, vectors, isolated DNA of any sequence, isolated RNA of any sequence, nucleic acid probes, and primers. The term also encompasses nucleic-acid-like structures with synthetic backbones, see, e.g., Eckstein, 1991; Baserga et al., 1992; Milligan, 1993; WO 97/03211; WO 96/39154; Mata, 1997; Strauss-Soukup, 1997; and Samstag, 1996. A polynucleotide may comprise one or more modified nucleotides, such as methylated nucleotides and nucleotide analogs. If present, modifications to the nucleotide structure may be imparted before or after assembly of the polymer. The sequence of nucleotides may be interrupted by non-nucleotide components. A polynucleotide may be further modified after polymerization, such as by conjugation with a labeling component. As used herein the term “wild type” is a term of the art understood by skilled persons and means the typical form of an organism, strain, gene or characteristic as it occurs in nature as distinguished from mutant or variant forms. A “wild type” can be a base line. As used herein the term “variant” should be taken to mean the exhibition of qualities that have a pattern that deviates from what occurs in nature. The terms “non-naturally occurring” or “engineered” are used interchangeably and indicate the involvement of the hand of man. The terms, when referring to nucleic acid molecules or polypeptides mean that the nucleic acid molecule or the polypeptide is at least substantially free from at least one other component with which they are naturally associated in nature and as found in nature. “Complementarity” refers to the ability of a nucleic acid to form hydrogen bond(s) with another nucleic acid sequence by either traditional Watson-Crick base pairing or other non-traditional types. A percent complementarity indicates the percentage of residues in a nucleic acid molecule which can form hydrogen bonds (e.g., Watson-Crick base pairing) with a second nucleic acid sequence (e.g., 5, 6, 7, 8, 9, 10 out of 10 being 50%, 60%, 70%, 80%, 90%, and 100% complementary). “Perfectly complementary” means that all the contiguous residues of a nucleic acid sequence will hydrogen bond with the same number of contiguous residues in a second nucleic acid sequence. “Substantially complementary” as used herein refers to a degree of complementarity that is at least 60%, 65%, 70%, 75%, 80%, 85%, 90%, 95%, 97%, 98%, 99%, or 100% over a region of 8, 9, 10, 11, 12, 13, 14, 15, 16, 17, 18, 19, 20, 21, 22, 23, 24, 25, 30, 35, 40, 45, 50, or more nucleotides, or refers to two nucleic acids that hybridize under stringent conditions. As used herein, “stringent conditions” for hybridization refer to conditions under which a nucleic acid having complementarity to a target sequence predominantly hybridizes with the target sequence, and substantially does not hybridize to non-target sequences. Stringent conditions are generally sequence-dependent, and vary depending on a number of factors. In general, the longer the sequence, the higher the temperature at which the sequence specifically hybridizes to its target sequence. Non-limiting examples of stringent conditions are described in detail in Tijssen (1993), Laboratory Techniques In Biochemistry And Molecular Biology-Hybridization With Nucleic Acid Probes Part I, Second Chapter “Overview of principles of hybridization and the strategy of nucleic acid probe assay”, Elsevier, N.Y. Where reference is made to a polynucleotide sequence, then complementary or partially complementary sequences are also envisaged. These are preferably capable of hybridizing to the reference sequence under highly stringent conditions. “Hybridization” refers to a reaction in which one or more polynucleotides react to form a complex that is stabilized via hydrogen bonding between the bases of the nucleotide residues. The hydrogen bonding may occur by Watson Crick base pairing, Hoogstein binding, or in any other sequence specific manner. The complex may comprise two strands forming a duplex structure, three or more strands forming a multi stranded complex, a single self-hybridizing strand, or any combination of these. A hybridization reaction may constitute a step in a more extensive process, such as the initiation of PCR, or the cleavage of a polynucleotide by an enzyme. A sequence capable of hybridizing with a given sequence is referred to as the “complement” of the given sequence. As used herein, the term “genomic locus” or “locus” (plural loci) is the specific location of a gene or DNA sequence on a chromosome. A “gene” refers to stretches of DNA or RNA that encode a polypeptide or an RNA chain that has functional role to play in an organism and hence is the molecular unit of heredity in living organisms. For the purpose of this invention, it may be considered that genes include regions which regulate the production of the gene product, whether or not such regulatory sequences are adjacent to coding and/or transcribed sequences. Accordingly, a gene includes, but is not necessarily limited to, promoter sequences, terminators, translational regulatory sequences such as ribosome binding sites and internal ribosome entry sites, enhancers, silencers, insulators, boundary elements, replication origins, matrix attachment sites and locus control regions. As used herein, “expression of a genomic locus” or “gene expression” is the process by which information from a gene is used in the synthesis of a functional gene product. The products of gene expression are often proteins, but in non-protein coding genes such as rRNA genes or tRNA genes, the product is functional RNA. The process of gene expression is used by all known life-eukaryotes (including multicellular organisms), prokaryotes (bacteria and archaea) and viruses to generate functional products to survive. As used herein “expression” of a gene or nucleic acid encompasses not only cellular gene expression, but also the transcription and translation of nucleic acid(s) in cloning systems and in any other context. As used herein, “expression” also refers to the process by which a polynucleotide is transcribed from a DNA template (such as into and mRNA or other RNA transcript) and/or the process by which a transcribed mRNA is subsequently translated into peptides, polypeptides, or proteins. Transcripts and encoded polypeptides may be collectively referred to as “gene product.” If the polynucleotide is derived from genomic DNA, expression may include splicing of the mRNA in a eukaryotic cell. The terms “polypeptide”, “peptide” and “protein” are used interchangeably herein to refer to polymers of amino acids of any length. The polymer may be linear or branched, it may comprise modified amino acids, and it may be interrupted by non amino acids. The terms also encompass an amino acid polymer that has been modified; for example, disulfide bond formation, glycosylation, lipidation, acetylation, phosphorylation, or any other manipulation, such as conjugation with a labeling component. As used herein the term “amino acid” includes natural and/or unnatural or synthetic amino acids, including glycine and both the D or L optical isomers, and amino acid analogs and peptidomimetics. As used herein, the term “domain” or “protein domain” refers to a part of a protein sequence that may exist and function independently of the rest of the protein chain. As described in aspects of the invention, sequence identity is related to sequence homology. Homology comparisons may be conducted by eye, or more usually, with the aid of readily available sequence comparison programs. These commercially available computer programs may calculate percent (%) homology between two or more sequences and may also calculate the sequence identity shared by two or more amino acid or nucleic acid sequences.

[0352] In an embodiment, the polynucleotide sequence is recombinant DNA. In further embodiments, the polynucleotide sequence further comprises additional sequences as described elsewhere herein. In an embodiment, the nucleic acid sequence is synthesized in vitro.

[0353] The present disclosure provides polynucleotide molecules that encode one or more components of the system or IsrB polypeptide nuclease as referred to in any embodiment herein. In an embodiment, the polynucleotide molecules may comprise further regulatory sequences. By means of guidance and not limitation, the polynucleotide sequence can be part of an expression plasmid, a minicircle, a lentiviral vector, a retroviral vector, an adenoviral or adeno-associated viral vector, a piggyback vector, or a tol2 vector. In an embodiment, the polynucleotide sequence may be a bicistronic expression construct. In further embodiments, the isolated polynucleotide sequence may be incorporated in a cellular genome. In yet further embodiments, the isolated polynucleotide sequence may be part of a cellular genome. In further embodiments, the isolated polynucleotide sequence may be comprised in an artificial chromosome. In an embodiment, the 5′ and/or 3′ end of the isolated polynucleotide sequence may be modified to improve the stability of the sequence of actively avoid degradation. In an embodiment, the isolated polynucleotide sequence may be comprised in a bacteriophage. In other embodiments, the isolated polynucleotide sequence may be contained in agrobacterium species. In an embodiment, the isolated polynucleotide sequence is lyophilized.

[0354] Aspects of the invention relate to polynucleotide molecules that encode one or more components of one or more systems as described in any of the embodiments herein, wherein at least one or more regions of the polynucleotide molecule may be codon optimized for expression in eukaryotic cells. In an embodiment, the polynucleotide molecules that encode one or more components of one or more systems as described in any of the embodiments herein are optimized for expression in a mammalian cell or a plant cell.

[0355] An example of a codon optimized sequence is in this instance a sequence optimized for expression in a eukaryote, e.g., humans (i.e. being optimized for expression in humans), or for another eukaryote, animal or mammal as herein discussed. In one embodiment, an enzyme coding sequence encoding a DNA/RNA-targeting IsrB polypeptide nuclease is codon optimized for expression in particular cells, such as eukaryotic cells. The eukaryotic cells may be those of or derived from a particular organism, such as a plant or a mammal, including but not limited to human, or non-human eukaryote or animal or mammal as herein discussed, e.g., mouse, rat, rabbit, dog, livestock, or non-human mammal or primate. In one embodiment, processes for modifying the germ line genetic identity of human beings and/or processes for modifying the genetic identity of animals which are likely to cause them suffering without any substantial medical benefit to man or animal, and also animals resulting from such processes, may be excluded. In general, codon optimization refers to a process of modifying a nucleic acid sequence for enhanced expression in the host cells of interest by replacing at least one codon (e.g., about or more than about 1, 2, 3, 4, 5, 10, 15, 20, 25, 50, or more codons) of the native sequence with codons that are more frequently or most frequently used in the genes of that host cell while maintaining the native amino acid sequence. Various species exhibit particular bias for certain codons of a particular amino acid. Codon bias (differences in codon usage between organisms) often correlates with the efficiency of translation of messenger RNA (mRNA), which is in turn believed to be dependent on, among other things, the properties of the codons being translated and the availability of particular transfer RNA (tRNA) molecules. The predominance of selected tRNAs in a cell is generally a reflection of the codons used most frequently in peptide synthesis. Accordingly, genes can be tailored for optimal gene expression in a given organism based on codon optimization. Codon usage tables are readily available, for example, at the “Codon Usage Database” available at www.kazusa.orjp/codon/and these tables can be adapted in a number of ways. See Nakamura, Y., et al. “Codon usage tabulated from the international DNA sequence databases: status for the year 2000” Nucl. Acids Res. 28:292 (2000). Computer algorithms for codon optimizing a particular sequence for expression in a particular host cell are also available, such as Gene Forge (Aptagen; Jacobus, PA), are also available. In one embodiment, one or more codons (e.g., 1, 2, 3, 4, 5, 10, 15, 20, 25, 50, or more, or all codons) in a sequence encoding a IscB polypeptide nuclease corresponds to the most frequently used codon for a particular amino acid.

### Delivery

[0356] The present disclosure also provides delivery systems for introducing components of the systems and compositions herein to cells, tissues, organs, or organisms. A delivery system may comprise one or more delivery vehicles and/or cargos. Exemplary delivery systems and methods include those described in paragraphs to of Feng Zhang et al., (WO2016106236A1), and pages 1241-1251 and Table 1 of Lino C A et al., Delivering CRISPR: a review of the challenges and approaches, DRUG DELIVERY, 2018, VOL. 25, NO. 1, 1234-1257, which are incorporated by reference herein in their entireties and can be adapted for use with the IscB proteins disclosed herein.

[0357] In one embodiment, the delivery systems may be used to introduce the components of the systems and compositions to plant cells. For example, the components may be delivered to plant using electroporation, microinjection, aerosol beam injection of plant cell protoplasts, biolistic methods, DNA particle bombardment, and/or Agrobacterium-mediated transformation. Examples of methods and delivery systems for plants include those described in Fu et al., Transgenic Res. 2000 February; 9 (1): 11-9; Klein R M, et al., Biotechnology. 1992; 24:384-6; Casas A M et al., Proc Natl Acad Sci USA. 1993 Dec. 1; 90 (23): 11212-11216; and U.S. Pat. No. 5,563,055, Davey M R et al., Plant Mol Biol. 1989 September; 13 (3): 273-85, which are incorporated by reference herein in their entireties.

[0358] The example delivery compositions, systems, and methods described herein related to composition or IsrB polypeptide nuclease also apply to functional domains and other components (e.g., other proteins and polynucleotides related to the IsrB polypeptide nuclease, such as reverse transcriptase, nucleotide deaminase, retrotransposon, donor polynucleotide, etc.).

### Cargos

[0359] The delivery systems may comprise one or more cargos. The cargos may comprise one or more components of the systems and compositions herein. A cargo may comprise one or more of the following: i) a plasmid encoding one or more protein components in the compositions and systems such as the IsrB polypeptide nuclease and/or functional domains; ii) a plasmid encoding one or more ωRNAs, iii) mRNA of one or more one or more proteins components in the compositions and systems such as the IsrB polypeptide nuclease and/or functional domains; iv) one or more proteins components in the compositions and systems such as the IsrB polypeptide nuclease and/or functional domains; v) any combination thereof. The one or more protein components may include the nuclei acid-guided nuclease (e.g., Cas), reverse transcriptase, nucleotide deaminase, retrotransposon protein, other functional domain, or any combination thereof.

[0360] In some examples, a cargo may comprise a plasmid encoding one or more proteins components in the compositions and systems such as the IsrB polypeptide nuclease and/or functional domains and one or more (e.g., a plurality of) ωRNAs. In some cases, the plasmid may also encode a recombination template (e.g., for HDR). In one embodiment, a cargo may comprise mRNA encoding one or more protein components and one or more ωRNA.

[0361] In some examples, a cargo may comprise one or more protein components and one or more ωRNA, e.g., in the form of ribonucleoprotein complexes (RNP). The ribonucleoprotein complexes may be delivered by methods and systems herein. In some cases, the ribonucleoprotein may be delivered by way of a polypeptide-based shuttle agent. In one example, the ribonucleoprotein may be delivered using synthetic peptides comprising an endosome leakage domain (ELD) operably linked to a cell penetrating domain (CPD), to a histidine-rich domain and a CPD, e.g., as describe in WO2016161516. RNP may also be used for delivering the compositions and systems to plant cells, e.g., as described in Wu J W, et al., Nat Biotechnol. 2015 November; 33 (11): 1162-4.

### Physical Delivery

[0362] In one embodiment, the cargos may be introduced to cells by physical delivery methods. Examples of physical methods include microinjection, electroporation, and hydrodynamic delivery. Both nucleic acid and proteins may be delivered using such methods. For example, one or more protein components may be prepared in vitro, isolated, (refolded, purified if needed), and introduced to cells.

### Microinjection

[0363] Microinjection of the cargo directly to cells can achieve high efficiency, e.g., above 90% or about 100%. In one embodiment, microinjection may be performed using a microscope and a needle (e.g., with 0.5-5.0 μm in diameter) to pierce a cell membrane and deliver the cargo directly to a target site within the cell. Microinjection may be used for in vitro and ex vivo delivery.

[0364] Plasmids comprising coding sequences for one or more protein components and/or ωRNAs, mRNAs may be microinjected. In some cases, microinjection may be used i) to deliver DNA directly to a cell nucleus, and/or ii) to deliver mRNA (e.g., in vitro transcribed) to a cell nucleus or cytoplasm. In certain examples, microinjection may be used to delivery ωRNA directly to the nucleus and mRNA to the cytoplasm, e.g., facilitating translation and shuttling of one or more protein components to the nucleus.

[0365] Microinjection may be used to generate genetically modified animals. For example, gene editing cargos may be injected into zygotes to allow for efficient germline modification. Such approach can yield normal embryos and full-term mouse pups harboring the desired modification(s). Microinjection can also be used to provide transiently up- or down-regulate a specific gene within the genome of a cell, e.g., using IsrB polypeptide.

### Electroporation

[0366] In one embodiment, the cargos and/or delivery vehicles may be delivered by electroporation. Electroporation may use pulsed high-voltage electrical currents to transiently open nanometer-sized pores within the cellular membrane of cells suspended in buffer, allowing for components with hydrodynamic diameters of tens of nanometers to flow into the cell. In some cases, electroporation may be used on various cell types and efficiently transfer cargo into cells. Electroporation may be used for in vitro and ex vivo delivery.

[0367] Electroporation may also be used to deliver the cargo to into the nuclei of mammalian cells by applying specific voltage and reagents, e.g., by nucleofection. Such approaches include those described in Wu Y, et al. (2015). Cell Res 25:67-79; Ye L, et al. (2014). Proc Natl Acad Sci USA 111:9591-6; Choi P S, Meyerson M. (2014). Nat Commun 5:3728; Wang J, Quake S R. (2014). Proc Natl Acad Sci 111:13157-62. Electroporation may also be used to deliver the cargo in vivo, e.g., with methods described in Zuckermann M, et al. (2015). Nat Commun 6:7391.

### Hydrodynamic Delivery

[0368] Hydrodynamic delivery may also be used for delivering the cargos, e.g., for in vivo delivery. In some examples, hydrodynamic delivery may be performed by rapidly pushing a large volume (8-10% body weight) solution containing the gene editing cargo into the bloodstream of a subject (e.g., an animal or human), e.g., for mice, via the tail vein. As blood is incompressible, the large bolus of liquid may result in an increase in hydrodynamic pressure that temporarily enhances permeability into endothelial and parenchymal cells, allowing for cargo not normally capable of crossing a cellular membrane to pass into cells. This approach may be used for delivering naked DNA plasmids and proteins. The delivered cargos may be enriched in liver, kidney, lung, muscle, and/or heart.

### Transfection

[0369] The cargos, e.g., nucleic acids, may be introduced to cells by transfection methods for introducing nucleic acids into cells. Examples of transfection methods include calcium phosphate-mediated transfection, cationic transfection, liposome transfection, dendrimer transfection, heat shock transfection, magnetofection, lipofection, impalefection, optical transfection, proprietary agent-enhanced uptake of nucleic acid.

### Delivery Vehicles

[0370] The delivery systems may comprise one or more delivery vehicles. The delivery vehicles may deliver the cargo into cells, tissues, organs, or organisms (e.g., animals or plants). The cargos may be packaged, carried, or otherwise associated with the delivery vehicles. The delivery vehicles may be selected based on the types of cargo to be delivered, and/or the delivery is in vitro and/or in vivo. Examples of delivery vehicles include vectors, viruses, non-viral vehicles, and other delivery reagents described herein.

[0371] The delivery vehicles in accordance with the present invention may have a greatest dimension (e.g. diameter) of less than 100 microns (μm). In one embodiment, the delivery vehicles have a greatest dimension of less than 10 μm. In one embodiment, the delivery vehicles may have a greatest dimension of less than 2000 nanometers (nm). In one embodiment, the delivery vehicles may have a greatest dimension of less than 1000 nanometers (nm). In one embodiment, the delivery vehicles may have a greatest dimension (e.g., diameter) of less than 900 nm, less than 800 nm, less than 700 nm, less than 600 nm, less than 500 nm, less than 400 nm, less than 300 nm, less than 200 nm, less than 150 nm, or less than 100 nm, less than 50 nm. In one embodiment, the delivery vehicles may have a greatest dimension ranging between 25 nm and 200 nm.

[0372] In one embodiment, the delivery vehicles may be or comprise particles. For example, the delivery vehicle may be or comprise nanoparticles (e.g., particles with a greatest dimension (e.g., diameter) no greater than 1000 nm. The particles may be provided in different forms, e.g., as solid particles (e.g., metal such as silver, gold, iron, titanium), non-metal, lipid-based solids, polymers), suspensions of particles, or combinations thereof. Metal, dielectric, and semiconductor particles may be prepared, as well as hybrid structures (e.g., core-shell particles). Nanoparticles may also be used to deliver the compositions and systems to plant cells, e.g., as described in International Patent Publication No. WO 2008042156, US Publication Application No. US20130185823, and International Patent Publication No WO 2015/089419.

### Vectors

[0373] The systems, compositions, and/or delivery systems may comprise one or more vectors. The present disclosure also includes vector systems. A vector system may comprise one or more vectors. In one embodiment, a vector refers to a nucleic acid molecule capable of transporting another nucleic acid to which it has been linked. Vectors include nucleic acid molecules that are single-stranded, double-stranded, or partially double-stranded; nucleic acid molecules that comprise one or more free ends, no free ends (e.g., circular); nucleic acid molecules that comprise DNA, RNA, or both; and other varieties of polynucleotides known in the art. A vector may be a plasmid, e.g., a circular double stranded DNA loop into which additional DNA segments can be inserted, such as by standard molecular cloning techniques. Certain vectors may be capable of autonomous replication in a host cell into which they are introduced (e.g., bacterial vectors having a bacterial origin of replication and episomal mammalian vectors). Some vectors (e.g., non-episomal mammalian vectors) are integrated into the genome of a host cell upon introduction into the host cell, and thereby are replicated along with the host genome. In certain examples, vectors may be expression vectors, e.g., capable of directing the expression of genes to which they are operatively-linked. In some cases, the expression vectors may be for expression in eukaryotic cells. Common expression vectors of utility in recombinant DNA techniques are often in the form of plasmids.

[0374] Examples of vectors include pGEX, pMAL, pRIT5, E. coli expression vectors (e.g., pTrc, pET 11d, yeast expression vectors (e.g., pYepSec1, pMFa, pJRY88, pYES2, and picZ, Baculovirus vectors (e.g., for expression in insect cells such as SF9 cells) (e.g., pAc series and the pVL series), mammalian expression vectors (e.g., pCDM8 and pMT2PC.

[0375] A vector may comprise i) one or more protein components encoding sequence(s), and/or ii) a single, or at least 2, at least 3, at least 4, at least 5, at least 6, at least 7, at least 8, at least 9, at least 10, at least 12, at least 14, at least 16, at least 32, at least 48, at least 50 guide RNA(s) encoding sequences. In a single vector there can be a promoter for each RNA coding sequence. Alternatively or additionally, in a single vector, there may be a promoter controlling (e.g., driving transcription and/or expression) multiple RNA encoding sequences.

[0376] Furthermore, that compositions or systems may be delivered via a vector, e.g., a separate vector or the same vector that is encoding the complex. When provided by a separate vector, the RNA that targets IsrB polypeptide nuclease expression can be administered sequentially or simultaneously. When administered sequentially, the RNA that targets IsrB polypeptide nuclease expression is to be delivered after the RNA that is intended for e.g. gene editing or gene engineering. This period may be a period of minutes (e.g. 5 minutes, 10 minutes, 20 minutes, 30 minutes, 45 minutes, 60 minutes). This period may be a period of hours (e.g. 2 hours, 4 hours, 6 hours, 8 hours, 12 hours, 24 hours). This period may be a period of days (e.g. 2 days, 3 days, 4 days, 7 days). This period may be a period of weeks (e.g. 2 weeks, 3 weeks, 4 weeks). This period may be a period of months (e.g. 2 months, 4 months, 8 months, 12 months). This period may be a period of years (2 years, 3 years, 4 years). In this fashion, the IsrB polypeptide nuclease associates with a first hRNA molecule capable of hybridizing to a first target, such as a genomic locus or loci of interest and undertakes the function(s) desired of the system (e.g., gene engineering); and subsequently the IsrB polypeptide nuclease may then associate with the second hRNA molecule capable of hybridizing to the sequence comprising at least part of the IsrB polypeptide nuclease. Where the guide RNA targets the sequences encoding expression of the IsrB polypeptide nuclease, the enzyme becomes impeded and the system becomes self-inactivating. In the same manner, RNA that targets IsrB polypeptide nuclease expression applied via, for example liposome, lipofection, particles, microvesicles as explained herein, may be administered sequentially or simultaneously. Similarly, self-inactivation may be used for inactivation of one or more ωRNA used to target one or more targets.

### Regulatory Elements

[0377] A vector may comprise one or more regulatory elements. The regulatory element(s) may be operably linked to coding sequences of IsrB polypeptide nuclease, accessory proteins, and a ωRNA scaffold. The term “operably linked” is intended to mean that the nucleotide sequence of interest is linked to the regulatory element(s) in a manner that allows for expression of the nucleotide sequence (e.g. in an in vitro transcription/translation system or in a host cell when the vector is introduced into the host cell). In certain examples, a vector may comprise: a first regulatory element operably linked to a nucleotide sequence encoding a IsrB polypeptide nuclease, and a second regulatory element operably linked to a nucleotide sequence encoding a ωRNA.

[0378] Examples of regulatory elements include promoters, enhancers, internal ribosomal entry sites (IRES), and other expression control elements (e.g., transcription termination signals, such as polyadenylation signals and poly-U sequences). Such regulatory elements are described, for example, in Goeddel, GENE EXPRESSION TECHNOLOGY: METHODS IN ENZYMOLOGY 185, Academic Press, San Diego, Calif. (1990). Regulatory elements include those that direct constitutive expression of a nucleotide sequence in many types of host cell and those that direct expression of the nucleotide sequence only in certain host cells (e.g., tissue-specific regulatory sequences). A tissue-specific promoter may direct expression primarily in a desired tissue of interest, such as muscle, neuron, bone, skin, blood, specific organs (e.g., liver, pancreas), or particular cell types (e.g., lymphocytes). Regulatory elements may also direct expression in a temporal-dependent manner, such as in a cell-cycle dependent or developmental stage-dependent manner, which may or may not also be tissue or cell-type specific.

[0379] Examples of promoters include one or more pol III promoter (e.g., 1, 2, 3, 4, 5, or more pol III promoters), one or more pol II promoters (e.g., 1, 2, 3, 4, 5, or more pol II promoters), one or more pol I promoters (e.g., 1, 2, 3, 4, 5, or more pol I promoters), or combinations thereof. Examples of pol III promoters include, but are not limited to, U6 and H1 promoters. Examples of pol II promoters include, but are not limited to, the retroviral Rous sarcoma virus (RSV) LTR promoter (optionally with the RSV enhancer), the cytomegalovirus (CMV) promoter (optionally with the CMV enhancer), the SV40 promoter, the dihydrofolate reductase promoter, the β-actin promoter, the phosphoglycerol kinase (PGK) promoter, and the EF1α promoter.

### Viral Vectors

[0380] The cargos may be delivered by viruses. In one embodiment, viral vectors are used. A viral vector may comprise virally-derived DNA or RNA sequences for packaging into a virus (e.g., retroviruses, replication defective retroviruses, adenoviruses, replication defective adenoviruses, and adeno-associated viruses). Viral vectors also include polynucleotides carried by a virus for transfection into a host cell. Viruses and viral vectors may be used for in vitro, ex vivo, and/or in vivo deliveries.

### Adeno Associated Virus (AAV)

[0381] The systems and compositions herein may be delivered by adeno associated virus (AAV). AAV vectors may be used for such delivery. AAV, of the Dependovirus genus and Parvoviridae family, is a single stranded DNA virus. In one embodiment, AAV may provide a persistent source of the provided DNA, as AAV delivered genomic material can exist indefinitely in cells, e.g., either as exogenous DNA or, with some modification, be directly integrated into the host DNA. In one embodiment, AAV do not cause or relate with any diseases in humans. The virus itself is able to efficiently infect cells while provoking little to no innate or adaptive immune response or associated toxicity.

[0382] Examples of AAV that can be used herein include AAV-1, AAV-2, AAV-3, AAV-4, AAV-5, AAV-6, AAV-8, and AAV-9. The type of AAV may be selected with regard to the cells to be targeted; e.g., one can select AAV serotypes 1, 2, 5 or a hybrid capsid AAV1, AAV2, AAV5 or any combination thereof for targeting brain or neuronal cells; and one can select AAV4 for targeting cardiac tissue. AAV8 is useful for delivery to the liver. AAV-2-based vectors were originally proposed for CFTR delivery to CF airways, other serotypes such as AAV-1, AAV-5, AAV-6, and AAV-9 exhibit improved gene transfer efficiency in a variety of models of the lung epithelium. Examples of cell types targeted by AAV are described in Grimm, D. et al, J. Virol. 82:5887-5911 (2008)), and shown in Table 5 as follows:

TABLE 3
Examples of cell types targeted by AAV.

| | AAV- | AAV- | AAV- | AAV- | AAV- | AAV- | AAV- | AAV- |
|---|---|---|---|---|---|---|---|---|
| Cell Line | 1 | 2 | 3 | 4 | 5 | 6 | 8 | 9 |
| Huh-7 | 13 | 100 | 2.5 | 0.0 | 0.1 | 10 | 0.7 | 0.0 |
| HEK293 | 25 | 100 | 2.5 | 0.1 | 0.1 | 5 | 0.7 | 0.1 |
| HeLa | 3 | 100 | 2.0 | 0.1 | 6.7 | 1 | 0.2 | 0.1 |
| HepG2 | 3 | 100 | 16.7 | 0.3 | 1.7 | 5 | 0.3 | ND |
| Hep1A | 20 | 100 | 0.2 | 1.0 | 0.1 | 1 | 0.2 | 0.0 |
| 911 | 17 | 100 | 11 | 0.2 | 0.1 | 17 | 0.1 | ND |
| CHO | 100 | 100 | 14 | 1.4 | 333 | 50 | 10 | 1.0 |
| COS | 33 | 100 | 33 | 3.3 | 5.0 | 14 | 2.0 | 0.5 |
| MeWo | 10 | 100 | 20 | 0.3 | 6.7 | 10 | 1.0 | 0.2 |
| NIH3T3 | 10 | 100 | 2.9 | 2.9 | 0.3 | 10 | 0.3 | ND |
| A549 | 14 | 100 | 20 | ND | 0.5 | 10 | 0.5 | 0.1 |
| HT1180 | 20 | 100 | 10 | 0.1 | 0.3 | 33 | 0.5 | 0.1 |
| Monocytes | 1111 | 100 | ND | ND | 125 | 1429 | ND | ND |
| Immature | 2500 | 100 | ND | ND | 222 | 2857 | ND | ND |
| DC | | | | | | | | |
| Mature DC | 2222 | 100 | ND | ND | 333 | 3333 | ND | ND |

[0383] The AAV particles may be created in HEK 293 T cells. Once particles with specific tropism have been created, they are used to infect the target cell line much in the same way that native viral particles do. This may allow for persistent presence of the components in the infected cell type, and what makes this version of delivery particularly suited to cases where long-term expression is desirable. Examples of doses and formulations for AAV that can be used include those describe in U.S. Pat. Nos. 8,454,972 and 8,404,658.

[0384] Various strategies may be used for delivery the systems and compositions herein with AAVs. In some examples, coding sequences of IsrB polypeptide nuclease and @ RNA may be packaged directly onto one DNA plasmid vector and delivered via one AAV particle. In some examples, AAVs may be used to deliver ωRNAs into cells that have been previously engineered to express IsrB polypeptide nuclease. In some examples, coding sequences of IsrB polypeptide nuclease and ωRNA may be made into two separate AAV particles, which are used for co-transfection of target cells. In some examples, markers, tags, and other sequences may be packaged in the same AAV particles as coding sequences of IsrB polypeptide nuclease and/or @ RNAs.

### Lentiviruses

[0385] The systems and compositions herein may be delivered by lentiviruses. Lentiviral vectors may be used for such delivery. Lentiviruses are complex retroviruses that have the ability to infect and express their genes in both mitotic and post-mitotic cells.

[0386] Examples of lentiviruses include human immunodeficiency virus (HIV), which may use its envelope glycoproteins of other viruses to target a broad range of cell types; minimal non-primate lentiviral vectors based on the equine infectious anemia virus (EIAV), which may be used for ocular therapies. In an embodiment, self-inactivating lentiviral vectors with an siRNA targeting a common exon shared by HIV tat/rev, a nucleolar-localizing TAR decoy, and an anti-CCR5-specific hammerhead ribozyme (see, e.g., DiGiusto et al. (2010) Sci Transl Med 2:36ra43) may be used/and or adapted to the nucleic acid-targeting system herein.

[0387] Lentiviruses may be pseudo-typed with other viral proteins, such as the G protein of vesicular stomatitis virus. In doing so, the cellular tropism of the lentiviruses can be altered to be as broad or narrow as desired. In some cases, to improve safety, second- and third-generation lentiviral systems may split essential genes across three plasmids, which may reduce the likelihood of accidental reconstitution of viable viral particles within cells.

[0388] In some examples, leveraging the integration ability, lentiviruses may be used to create libraries of cells comprising various genetic modifications, e.g., for screening and/or studying genes and signaling pathways.

### Adenoviruses

[0389] The systems and compositions herein may be delivered by adenoviruses. Adenoviral vectors may be used for such delivery. Adenoviruses include nonenveloped viruses with an icosahedral nucleocapsid containing a double stranded DNA genome. Adenoviruses may infect dividing and non-dividing cells. In one embodiment, adenoviruses do not integrate into the genome of host cells, which may be used for limiting off-target effects of systems in gene editing applications.

### Viral Vehicles for Delivery to Plants

[0390] The systems and compositions may be delivered to plant cells using viral vehicles. In one embodiment, the compositions and systems may be introduced in the plant cells using a plant viral vector (e.g., as described in Scholthof et al. 1996, Annu Rev Phytopathol. 1996; 34:299-323). Such viral vector may be a vector from a DNA virus, e.g., geminivirus (e.g., cabbage leaf curl virus, bean yellow dwarf virus, wheat dwarf virus, tomato leaf curl virus, maize streak virus, tobacco leaf curl virus, or tomato golden mosaic virus) or nanovirus (e.g., Faba bean necrotic yellow virus). The viral vector may be a vector from an RNA virus, e.g., tobravirus (e.g., tobacco rattle virus, tobacco mosaic virus), potexvirus (e.g., potato virus X), or hordeivirus (e.g., barley stripe mosaic virus). The replicating genomes of plant viruses may be non-integrative vectors.

### Non-Viral Vehicles

[0391] The delivery vehicles may comprise non-viral vehicles. In general, methods and vehicles capable of delivering nucleic acids and/or proteins may be used for delivering the systems compositions herein. Examples of non-viral vehicles include lipid nanoparticles, cell-penetrating peptides (CPPs), DNA nanoclews, gold nanoparticles, streptolysin O, multifunctional envelope-type nanodevices (MENDs), lipid-coated mesoporous silica particles, and other inorganic nanoparticles.

### Lipid Particles

[0392] The delivery vehicles may comprise lipid particles, e.g., lipid nanoparticles (LNPs) and liposomes.

### Lipid Nanoparticles (LNPs)

[0393] LNPs may encapsulate nucleic acids within cationic lipid particles (e.g., liposomes), and may be delivered to cells with relative ease. In some examples, lipid nanoparticles do not contain any viral components, which helps minimize safety and immunogenicity concerns. Lipid particles may be used for in vitro, ex vivo, and in vivo deliveries. Lipid particles may be used for various scales of cell populations.

[0394] In some examples. LNPs may be used for delivering DNA molecules (e.g., those comprising coding sequences of IscB polypeptide nuclease and/or hRNA) and/or RNA molecules (e.g., mRNA of IsrB polypeptide nuclease, ωRNA). In certain cases, LNPs may be use for delivering RNP complexes of IsrB polypeptide/@ RNA.

[0395] Components in LNPs may comprise cationic lipids 1,2-dilineoyl-3-dimethylammonium-propane (DLinDAP), 1,2-dilinoleyloxy-3-N,N-dimethylaminopropane (DLinDMA), 1,2-dilinoleyloxyketo-N,N-dimethyl-3-aminopropane (DLinK-DMA), 1,2-dilinoleyl-4-(2-dimethylaminoethyl)-[1,3]-dioxolane (DLinKC2-DMA), (3-O-[2″-(methoxypolyethyleneglycol 2000) succinoyl]-1,2-dimyristoyl-sn-glycol (PEG-S-DMG), R-3-[(ro-methoxy-poly(ethylene glycol) 2000) carbamoyl]-1,2-dimyristyloxlpropyl-3-amine (PEG-C-DOMG, and any combination thereof. Preparation of LNPs and encapsulation may be adapted from Rosin et al, Molecular Therapy, vol. 19, no. 12, pages 1286-220 Dec. 2011).

### Liposomes

[0396] In one embodiment, a lipid particle may be liposome. Liposomes are spherical vesicle structures composed of a uni- or multilamellar lipid bilayer surrounding internal aqueous compartments and a relatively impermeable outer lipophilic phospholipid bilayer. In one embodiment, liposomes are biocompatible, nontoxic, can deliver both hydrophilic and lipophilic drug molecules, protect their cargo from degradation by plasma enzymes, and transport their load across biological membranes and the blood brain barrier (BBB).

[0397] Liposomes can be made from several different types of lipids, e.g., phospholipids. A liposome may comprise natural phospholipids and lipids such as 1,2-distearoryl-sn-glycero-3-phosphatidyl choline (DSPC), sphingomyelin, egg phosphatidylcholines, monosialoganglioside, or any combination thereof.

[0398] Several other additives may be added to liposomes in order to modify their structure and properties. For instance, liposomes may further comprise cholesterol, sphingomyelin, and/or 1,2-dioleoyl-sn-glycero-3-phosphoethanolamine (DOPE), e.g., to increase stability and/or to prevent the leakage of the liposomal inner cargo.

### Stable Nucleic-Acid-Lipid Particles (SNALPs)

[0399] In one embodiment, the lipid particles may be stable nucleic acid lipid particles (SNALPs). SNALPs may comprise an ionizable lipid (DLinDMA) (e.g., cationic at low pH), a neutral helper lipid, cholesterol, a diffusible polyethylene glycol (PEG)-lipid, or any combination thereof. In some examples, SNALPs may comprise synthetic cholesterol, dipalmitoylphosphatidylcholine, 3-N-[(w-methoxy polyethylene glycol) 2000) carbamoyl]-1,2-dimyrestyloxypropylamine, and cationic 1,2-dilinoleyloxy-3-N,Ndimethylaminopropane. In some examples, SNALPs may comprise synthetic cholesterol, 1,2-distearoyl-sn-glycero-3-phosphocholine, PEG-CDMA, and 1,2-dilinoleyloxy-3-(N;N-dimethyl)aminopropane (DLinDMA).

### Other Lipids

[0400] The lipid particles may also comprise one or more other types of lipids, e.g., cationic lipids, such as amino lipid 2,2-dilinoleyl-4-dimethylaminoethyl-[1,3]-dioxolane (DLin-KC2-DMA), DLin-KC2-DMA4, C12-200 and colipids disteroylphosphatidyl choline, cholesterol, and PEG-DMG.

### Lipoplexes/Polyplexes

[0401] In one embodiment, the delivery vehicles comprise lipoplexes and/or polyplexes. Lipoplexes may bind to negatively charged cell membrane and induce endocytosis into the cells. Examples of lipoplexes may be complexes comprising lipid(s) and non-lipid components. Examples of lipoplexes and polyplexes include FuGENE-6 reagent, a non-liposomal solution containing lipids and other components, zwitterionic amino lipids (ZALs), Ca2p (e.g., forming DNA/Ca²⁺ microcomplexes), polyethenimine (PEI) (e.g., branched PEI), and poly (L-lysine) (PLL).

### Cell Penetrating Peptides

[0402] In one embodiment, the delivery vehicles comprise cell penetrating peptides (CPPs). CPPs are short peptides that facilitate cellular uptake of various molecular cargo (e.g., from nanosized particles to small chemical molecules and large fragments of DNA).

[0403] CPPs may be of different sizes, amino acid sequences, and charges. In some examples, CPPs can translocate the plasma membrane and facilitate the delivery of various molecular cargoes to the cytoplasm or an organelle. CPPs may be introduced into cells via different mechanisms, e.g., direct penetration in the membrane, endocytosis-mediated entry, and translocation through the formation of a transitory structure.

[0404] CPPs may have an amino acid composition that either contains a high relative abundance of positively charged amino acids such as lysine or arginine or has sequences that contain an alternating pattern of polar/charged amino acids and non-polar, hydrophobic amino acids. These two types of structures are referred to as polycationic or amphipathic, respectively. A third class of CPPs are the hydrophobic peptides, containing only apolar residues, with low net charge or have hydrophobic amino acid groups that are crucial for cellular uptake. Another type of CPPs is the trans-activating transcriptional activator (Tat) from Human Immunodeficiency Virus 1 (HIV-1). Examples of CPPs include to Penetratin, Tat (48-60), Transportan, and (R-AhX-R4) (Ahx refers to aminohexanoyl), Kaposi fibroblast growth factor (FGF) signal peptide sequence, integrin β3 signal peptide sequence, polyarginine peptide Args sequence, Guanine rich-molecular transporters, and sweet arrow peptide. Examples of CPPs and related applications also include those described in U.S. Pat. No. 8,372,951.

[0405] CPPs can be used for in vitro and ex vivo work quite readily, and extensive optimization for each cargo and cell type is usually required. In some examples, CPPs may be covalently attached to the IscB polypeptide nuclease directly, which is then complexed with the hRNA and delivered to cells. In some examples, separate delivery of CPP-IscB and CPP-hRNA to multiple cells may be performed. CPP may also be used to delivery RNPs.

[0406] CPPs may be used to deliver the compositions and systems to plants. In some examples, CPPs may be used to deliver the components to plant protoplasts, which are then regenerated to plant cells and further to plants.

### Dna Nanoclews

[0407] In one embodiment, the delivery vehicles comprise DNA nanoclews. A DNA nanoclew refers to a sphere-like structure of DNA (e.g., with a shape of a ball of yarn). The nanoclew may be synthesized by rolling circle amplification with palindromic sequences that aide in the self-assembly of the structure. The sphere may then be loaded with a payload. An example of DNA nanoclew is described in Sun W et al, J Am Chem Soc. 2014 Oct. 22; 136 (42): 14722-5; and Sun W et al, Angew Chem Int Ed Engl. 2015 Oct. 5; 54 (41): 12029-33. DNA nanoclew may have a palindromic sequences to be partially complementary to the guide RNA within the IscB polypeptide nuclease: hRNA ribonucleoprotein complex. A DNA nanoclew may be coated, e.g., coated with PEI to induce endosomal escape.

### Gold Nanoparticles

[0408] In one embodiment, the delivery vehicles comprise gold nanoparticles (also referred to AuNPs or colloidal gold). Gold nanoparticles may form complex with cargos, e.g., IscB polypeptide nuclease: hRNA RNP. Gold nanoparticles may be coated, e.g., coated in a silicate and an endosomal disruptive polymer, PAsp (DET). Examples of gold nanoparticles include AuraSense Therapeutics' Spherical Nucleic Acid (SNA™) constructs, and those described in Mout R, et al. (2017). ACS Nano 11:2452-8; Lee K, et al. (2017). Nat Biomed Eng 1:889-901.

iTOP

[0409] In one embodiment, the delivery vehicles comprise iTOP. iTOP refers to a combination of small molecules drives the highly efficient intracellular delivery of native proteins, independent of any transduction peptide. iTOP may be used for induced transduction by osmocytosis and propanebetaine, using NaCl-mediated hyperosmolality together with a transduction compound (propanebetaine) to trigger macropinocytotic uptake into cells of extracellular macromolecules. Examples of iTOP methods and reagents include those described in D′Astolfo D S, Pagliero R J, Pras A, et al. (2015). Cell 161:674-690.

### Polymer-Based Particles

[0410] In one embodiment, the delivery vehicles may comprise polymer-based particles (e.g., nanoparticles). In one embodiment, the polymer-based particles may mimic a viral mechanism of membrane fusion. The polymer-based particles may be a synthetic copy of Influenza virus machinery and form transfection complexes with various types of nucleic acids ((siRNA, miRNA, plasmid DNA or shRNA, mRNA) that cells take up via the endocytosis pathway, a process that involves the formation of an acidic compartment. The low pH in late endosomes acts as a chemical switch that renders the particle surface hydrophobic and facilitates membrane crossing. Once in the cytosol, the particle releases its payload for cellular action. This Active Endosome Escape technology is safe and maximizes transfection efficiency as it is using a natural uptake pathway. In one embodiment, the polymer-based particles may comprise alkylated and carboxyalkylated branched polyethylenimine. In some examples, the polymer-based particles are VIROMER, e.g., VIROMER RNAi, VIROMER RED, VIROMER mRNA. Example methods of delivering the systems and compositions herein include those described in Bawage S S et al., Synthetic mRNA expressed Cas13a mitigates RNA virus infections, www.biorxiv.org/content/10.1101/370460v1.full doi: doi.org/10.1101/370460, Viromer® RED, a powerful tool for transfection of keratinocytes. doi: 10.13140/RG.2.2.16993.61281, Viromer® Transfection-Factbook 2018: technology, product overview, users' data., doi: 10.13140/RG.2.2.23912.16642.

### Streptolysin O (SLO)

[0411] The delivery vehicles may be streptolysin O (SLO). SLO is a toxin produced by Group A streptococci that works by creating pores in mammalian cell membranes. SLO may act in a reversible manner, which allows for the delivery of proteins (e.g., up to 100 kDa) to the cytosol of cells without compromising overall viability. Examples of SLO include those described in Sierig G, et al. (2003). Infect Immun 71:446-55; Walev I, et al. (2001). Proc Natl Acad Sci USA 98:3185-90; Teng K W, et al. (2017). Elife 6: e25460.

### Multifunctional Envelope-Type Nanodevice (MEND)

[0412] The delivery vehicles may comprise multifunctional envelope-type nanodevice (MENDs). MENDs may comprise condensed plasmid DNA, a PLL core, and a lipid film shell. A MEND may further comprise cell-penetrating peptide (e.g., stearyl octaarginine). The cell penetrating peptide may be in the lipid shell. The lipid envelope may be modified with one or more functional components, e.g., one or more of: polyethylene glycol (e.g., to increase vascular circulation time), ligands for targeting of specific tissues/cells, additional cell-penetrating peptides (e.g., for greater cellular delivery), lipids to enhance endosomal escape, and nuclear delivery tags. In some examples, the MEND may be a tetra-lamellar MEND (T-MEND), which may target the cellular nucleus and mitochondria. In certain examples, a MEND may be a PEG-peptide-DOPE-conjugated MEND (PPD-MEND), which may target bladder cancer cells. Examples of MENDs include those described in Kogure K, et al. (2004). J Control Release 98:317-23; Nakamura T, et al. (2012). Acc Chem Res 45:1113-21.

### Lipid-Coated Mesoporous Silica Particles

[0413] The delivery vehicles may comprise lipid-coated mesoporous silica particles. Lipid-coated mesoporous silica particles may comprise a mesoporous silica nanoparticle core and a lipid membrane shell. The silica core may have a large internal surface area, leading to high cargo loading capacities. In one embodiment, pore sizes, pore chemistry, and overall particle sizes may be modified for loading different types of cargos. The lipid coating of the particle may also be modified to maximize cargo loading, increase circulation times, and provide precise targeting and cargo release. Examples of lipid-coated mesoporous silica particles include those described in Du X, et al. (2014). Biomaterials 35:5580-90; Durfee P N, et al. (2016). ACS Nano 10:8325-45.

### Inorganic Nanoparticles

[0414] The delivery vehicles may comprise inorganic nanoparticles. Examples of inorganic nanoparticles include carbon nanotubes (CNTs) (e.g., as described in Bates K and Kostarelos K. (2013). Adv Drug Deliv Rev 65:2023-33.), bare mesoporous silica nanoparticles (MSNPs) (e.g., as described in Luo G F, et al. (2014). Sci Rep 4:6064), and dense silica nanoparticles (SiNPs) (as described in Luo D and Saltzman W M. (2000). Nat Biotechnol 18:893-5).

### Exosomes

[0415] The delivery vehicles may comprise exosomes. Exosomes include membrane bound extracellular vesicles, which can be used to contain and delivery various types of biomolecules, such as proteins, carbohydrates, lipids, and nucleic acids, and complexes thereof (e.g., RNPs). Examples of exosomes include those described in Schroeder A, et al., J Intern Med. 2010 January; 267 (1): 9-21; El-Andaloussi S, et al., Nat Protoc. 2012 December; 7 (12): 2112-26; Uno Y, et al., Hum Gene Ther. 2011 June; 22 (6): 711-9; Zou W, et al., Hum Gene Ther. 2011 April; 22 (4): 465-75.

[0416] In some examples, the exosome may form a complex (e.g., by binding directly or indirectly) to one or more components of the cargo. In certain examples, a molecule of an exosome may be fused with first adapter protein and a component of the cargo may be fused with a second adapter protein. The first and the second adapter protein may specifically bind each other, thus associating the cargo with the exosome. Examples of such exosomes include those described in Ye Y, et al., Biomater Sci. 2020 Apr. 28. doi: 10.1039/d0bm00427h.

### Retrovirus Like Delivery Systems

[0417] The delivery vehicle may comprise a retro-virus like protein, such as PEG10, which is capable of incorporating a cargo into a virus-like particle. As such systems can be re-programmed to package specific cargos, polynucleotides encoding composnents of the IsrB systems disclosed herein may be further modified with a recognition sequence that leads to selective packaging of the IsrB components into such retro-virus like VLPs. Said VLPs may be further modified with fusogenic proteins that impart tissue or cell specificity. Example systems are disclosed in Segal et al. Mammalian retrovirus-like protein PEG10 packages its own mRNA and can be pseudotyped for mRNA delivery. 373 Science, 882-889 (2021), which is incorporated herein by reference.

### Genetically Modified Cells and Organisms

[0418] The present disclosure further provides cells comprising one or more components of the compositions and systems herein, e.g., the IscB polypeptide or CRISPR-associated IscB polypeptide nuclease and/or ωRNA(s). Also provided include cells modified by the systems and methods herein, and cell cultures, tissues, organs, organism comprising such cells or progeny thereof. In one embodiment, the present disclosure provides a method of modifying an cell or organism. The cell may be a prokaryotic cell or a eukaryotic cell. The cell may be a mammalian cell. The mammalian cell many be a non-human primate, bovine, porcine, rodent or mouse cell. The cell may be a non-mammalian eukaryotic cell such as poultry, fish or shrimp. The cell may be a therapeutic T cell or antibody-producing B-cell. The cell may also be a plant cell. The plant cell may be of a crop plant such as cassava, corn, sorghum, wheat, or rice. The plant cell may also be of an algae, tree or vegetable. The modification introduced to the cell by the present invention may be such that the cell and progeny of the cell are altered for improved production of biologic products such as an antibody, starch, alcohol or other desired cellular output. The modification introduced to the cell by the present invention may be such that the cell and progeny of the cell include an alteration that changes the biologic product produced.

[0419] In one embodiment, one or more polynucleotide molecules, vectors, or vector systems driving expression of one or more elements of the compositions, systems, or delivery systems comprising one or more elements of the nucleic acid-targeting system are introduced into a host cell such that expression of the elements of the nucleic acid-targeting system direct formation of a nucleic acid-targeting complex at one or more target sites. In an embodiment of the invention the host cell may be a eukaryotic cell, a prokaryotic cell, or a plant cell.

[0420] In one embodiment, the host cell is a cell of a cell line. Cell lines are available from a variety of sources known to those with skill in the art (see, e.g., the American Type Culture Collection (ATCC) (Manassas, Va.)). In one embodiment, a cell transfected with one or more vectors described herein is used to establish a new cell line comprising one or more vector-derived sequences. In one embodiment, a cell transiently transfected with the components of a system as described herein (such as by transient transfection of one or more vectors, or transfection with RNA), and modified through the activity of a complex, is used to establish a new cell line comprising cells containing the modification but lacking any other exogenous sequence. In one embodiment, cells transiently or non-transiently transfected with one or more vectors described herein, or cell lines derived from such cells are used in assessing one or more test compounds.

[0421] Further intended are isolated human cells or tissues, plants or non-human animals comprising one or more of the polynucleotide molecules, vectors, vector systems, or cells described in any of the embodiments herein. In an aspect, host cells and cell lines modified by or comprising the compositions, systems or modified enzymes of present invention are provided, including (isolated) stem cells, and progeny thereof.

[0422] In an embodiment, the plants or non-human animals comprise at least one of the system components, polynucleotide molecules, vectors, vector systems, or cells described in any of the embodiments herein at least one tissue type of the plant or non-human animal. In an embodiment, non-human animals comprise at least one of the system components, polynucleotide molecules, vectors, vector systems, or cells described in any of the embodiments herein in at least one tissue type. In an embodiment, the presence of the system components is transient, in that they are degraded over time. In an embodiment, expression of the components of the systems and compositions described in any of the embodiments comprised in polynucleotide molecules, vectors, vector systems, or cells is limited to certain tissue types or regions in the plant or non-human animal. In an embodiment, the expression of the components of the systems and compositions described in any of the embodiments comprised in polynucleotide molecules, vectors, vector systems, or cells is dependent of a physiological cue. In an embodiment, expression of the components of the systems and compositions described in any of the embodiments comprised in polynucleotide molecules, vectors, vector systems, or cells may be triggered by an exogenous molecule. In an embodiment, expression of the components of the systems and compositions described in any of the embodiments comprised in polynucleotide molecules, vectors, vector systems, or cells is dependent on the expression of a non-cas molecule in the plant or non-human animal.

### Applications and Uses in General

[0423] The systems, the vector systems, the vectors and the compositions described herein may be used in various nucleic acids-targeting applications, altering or modifying synthesis of a gene product, such as a protein, nucleic acids cleavage, nucleic acids editing, nucleic acids splicing; trafficking of target nucleic acids, tracing of target nucleic acids, isolation of target nucleic acids, visualization of target nucleic acids, etc.

[0424] Aspects of the invention thus also encompass methods and uses of the compositions and systems described herein in genome engineering, e.g. for altering or manipulating the expression of one or more genes or the one or more gene products, in prokaryotic or eukaryotic cells, in vitro, in vivo or ex vivo. In some examples, the target polynucleotides are target sequences within genomic DNA, including nuclear genomic DNA, mitochondrial DNA, or chloroplast DNA.

[0425] Typically, in the context of a nucleic acid-targeting system, formation of a nucleic acid-targeting complex (comprising a ωRNA or guide RNA hybridized to a target sequence and complexed with one or more nucleic acid-targeting effector proteins) results in cleavage of one or both DNA or RNA strands in or near (e.g., within 1, 2, 3, 4, 5, 6, 7, 8, 9, 10, 20, 50, or more base pairs from) the target sequence. As used herein the term “sequence(s) associated with a target locus of interest” refers to sequences near the vicinity of the target sequence (e.g. within 1, 2, 3, 4, 5, 6, 7, 8, 9, 10, 20, 50, or more base pairs from the target sequence, wherein the target sequence is comprised within a target locus of interest).

[0426] In one embodiment, the present disclosure provides a method of targeting a polynucleotide, comprising contacting a sample (such as cell, population of cells, tissue, organ, or an organism) that comprises a target polynucleotide with the composition, systems, polynucleotide(s), or vector(s). The contacting may result in modification of a gene product or modification of the amount or expression of a gene product. In some examples, the target sequence of the polynucleotide is a disease-associated target sequence.

[0427] In one embodiment, the present disclosure provides a method of modifying target polynucleotides comprising delivering the composition, the one or more polynucleotides of 2, or one or more vectors to a cell or population of cells comprising the target polynucleotides, wherein the complex directs the reverse transcriptase to the target sequence and the reverse transcriptase facilitates insertion of the donor sequence from the ωRNA into the target polynucleotide.

[0428] Examples of target polynucleotides include a sequence associated with a signaling biochemical pathway, e.g., a signaling biochemical pathway-associated gene or polynucleotide. Examples of target polynucleotides include a disease associated gene or polynucleotide. A “disease-associated” gene or polynucleotide refers to any gene or polynucleotide which is yielding transcription or translation products at an abnormal level or in an abnormal form in cells derived from a disease-affected tissues compared with tissues or cells of a non-disease control. It may be a gene that becomes expressed at an abnormally high level; it may be a gene that becomes expressed at an abnormally low level, where the altered expression correlates with the occurrence and/or progression of the disease. A disease-associated gene also refers to a gene possessing mutation(s) or genetic variation that is directly responsible or is in linkage disequilibrium with a gene(s) that is responsible for the etiology of a disease. The transcribed or translated products may be known or unknown, and may be at a normal or abnormal level.

[0429] The target polynucleotide of a complex can be any polynucleotide endogenous or exogenous to the eukaryotic cell. For example, the target polynucleotide can be a polynucleotide residing in the nucleus of the eukaryotic cell. The target polynucleotide can be a sequence coding a gene product (e.g., a protein) or a non-coding sequence (e.g., a regulatory polynucleotide or a junk DNA). Without wishing to be bound by theory, it is believed that the target sequence should be associated with a TAM (target adjacent motif); that is, a short sequence recognized by the complex. The precise sequence and length requirements for the TAM differ depending on the IsrB polypeptide nuclease used, but TAMs are typically 2-5 base pair sequences adjacent the protospacer (that is, the target sequence) A skilled person will be able to identify further TAM sequences for use with a given IsrB polypeptide nuclease. Further, engineering of the TAM Interacting domain may allow programing of TAM specificity, improve target site recognition fidelity, and increase the versatility of the IsrB polypeptide nuclease, genome engineering platform. IsrB polypeptide nuclease may be engineered to alter their TAM specificity.

[0430] In an embodiment the IsrB TAM is ATNA where N is any nucleotide. In an embodiment, the IsrB TAM is ATGA, ATAA, ATAAA, or ATN. In one embodiment, the IsrB is Ignatius tetrasporus and the TAM is NNG.

[0431] Examples of target polynucleotides include a sequence associated with a signaling biochemical pathway, e.g., a signaling biochemical pathway-associated gene or polynucleotide. Examples of target polynucleotides include a disease associated gene or polynucleotide. A “disease-associated” gene or polynucleotide refers to any gene or polynucleotide which is yielding transcription or translation products at an abnormal level or in an abnormal form in cells derived from a disease-affected tissues compared with tissues or cells of a non-disease control. It may be a gene that becomes expressed at an abnormally high level; it may be a gene that becomes expressed at an abnormally low level, where the altered expression correlates with the occurrence and/or progression of the disease. A disease-associated gene also refers to a gene possessing mutation(s) or genetic variation that is directly responsible or is in linkage disequilibrium with a gene(s) that is responsible for the etiology of a disease. The transcribed or translated products may be known or unknown, and may be at a normal or abnormal level.

[0432] Aspects of the invention relate to a method of targeting a polynucleotide, comprising contacting a sample that comprises the polynucleotide with a composition, system or IsrB polypeptide nuclease as described in any embodiment herein, a delivery system comprising a composition, system or IsrB polypeptide nuclease as described in any embodiment herein, a polynucleotide comprising a composition, system or IsrB polypeptide nuclease as described in any embodiment herein, a vector comprising a composition, system or IsrB polypeptide nuclease as described in any embodiment herein, or a vector system comprising a composition, system or IsrB polypeptide nuclease as described in any embodiment herein. In an embodiment, a target polynucleotide is contacted with at least two different composition, system or IsrB nucleases. In further embodiments, the two different IsrB polypeptide nuclease have different target polynucleotide specificities, or degrees of specificity. In an embodiment, the two different IsrB polypeptide nuclease have a different TAM specificity.

[0433] Also envisaged are methods of targeting a polynucleotide, comprising contacting a sample that comprises the polynucleotide with the composition and systems, vectors, polynucleotides, herein wherein contacting results in modification of a gene product or modification of the amount or expression of a gene product. In an embodiment, the expression of the targeted gene product is increased by the method. In an embodiment, the expression of the targeted gene product is increased by at least 10%, at least 15%, at least 20%, at least 25%, at least 30%, at least 35%, at least 40%, at least 45%, at least 50%, at least 55%, at least 60%, at least 65%, at least 70%, at least 75%, at least 80%, at least 85%, p at least 90%, at least 95%, 100%. In an embodiment, the expression of the targeted gene product is increased at least 1.5-fold, at least 2-fold, at least 2.5-fold, at least 3-fold, at least 3.5-fold, at least 3.5-fold, at least 4-fold, at least 4.5-fold, at least 5-fold, at least 10-fold, at least 10-fold, at least 15-fold, at least 20-fold, at least 25-fold, at least 50-fold, at least 100-fold. In an embodiment, the expression of the targeted gene product is reduced by at least 10%, by at least 15%, by at least 20%, by at least 25%, by at least 30%, by at least 35%, by at least 40%, by at least 45%, by at least 50%, by at least 55%, by at least 60%, by at least 65%, by at least 70%, by at least 75%, by at least 80%, by at least 85%, by at least 90%, by at least 95%, by at least 100%. In an embodiment, the expression of the targeted gene product is reduced at least 1.5-fold, at least 2-fold, at least 2.5-fold, at least 3-fold, at least 3.5-fold, at least 3.5-fold, at least 4-fold, at least 4.5-fold, at least 5-fold, at least 10-fold, at least 10-fold, at least 15-fold, at least 20-fold, at least 25-fold, at least 50-fold, at least 100-fold. In alternative embodiments, the expression of the targeted gene product is reduced by the method. In further embodiments, expression of the targeted gene may be completely eliminated, or may be considered eliminated as remnant expression levels of the targeted gene fall below the detection limit of methods known in the art that are used to quantify, detect, or monitor expression levels of genes.

[0434] In one embodiment, one or more polynucleotide molecules, vectors, or vector systems driving expression of one or more elements of a nucleic acid-targeting system or delivery systems comprising one or more elements of the nucleic acid-targeting system are introduced into a host cell such that expression of the elements of the nucleic acid-targeting system direct formation of a nucleic acid-targeting complex at one or more target sites. In an embodiment of the invention the host cell may be a eukaryotic cell, a prokaryotic cell, or a plant cell.

[0435] In one embodiment, the host cell is a cell of a cell line. Cell lines are available from a variety of sources known to those with skill in the art (see, e.g., the American Type Culture Collection (ATCC) (Manassas, Va.)). In one embodiment, a cell transfected with one or more vectors described herein is used to establish a new cell line comprising one or more vector-derived sequences. In one embodiment, a cell transiently transfected with the components of a composition or system as described herein (such as by transient transfection of one or more vectors, or transfection with RNA), and modified through the activity of a complex, is used to establish a new cell line comprising cells containing the modification but lacking any other exogenous sequence. In one embodiment, cells transiently or non-transiently transfected with one or more vectors described herein, or cell lines derived from such cells are used in assessing one or more test compounds.

[0436] Further intended are isolated human cells or tissues, plants or non-human animals comprising one or more of the polynucleotide molecules, vectors, vector systems, or cells described in any of the embodiments herein. In an aspect, host cells and cell lines modified by or comprising the compositions, systems or modified enzymes of present invention are provided, including (isolated) stem cells, and progeny thereof.

[0437] In an embodiment, the plants or non-human animals comprise at least one of the compositions, polynucleotide molecules, vectors, vector systems, or cells described in any of the embodiments herein at least one tissue type of the plant or non-human animal. In certain embodiment, non-human animals comprise at least one of the compositions, polynucleotide molecules, vectors, vector systems, or cells described in any of the embodiments herein in at least one tissue type. In an embodiment, the presence of the compositions is transient, in that they are degraded over time. In an embodiment, expression of the compositions described in any of the embodiments comprised in polynucleotide molecules, vectors, vector systems, or cells is limited to certain tissue types or regions in the plant or non-human animal. In an embodiment, the expression of the compositions described in any of the embodiments comprised in polynucleotide molecules, vectors, vector systems, or cells is dependent of a physiological cue. In an embodiment, expression of the compositions described in any of the embodiments comprised in polynucleotide molecules, vectors, vector systems, or cells may be triggered by an exogenous molecule. In an embodiment, expression of the compositions described in any of the embodiments comprised in polynucleotide molecules, vectors, vector systems, or cells is dependent on the expression of a non-Cas molecule in the plant or non-human animal.

[0438] In one aspect, the invention provides methods for using one or more elements of a nucleic acid-targeting system. The nucleic acid-targeting complex of the invention provides an effective means for modifying a target DNA or RNA (single or double stranded, linear or super-coiled). The nucleic acid-targeting complex of the invention has a wide variety of utility including modifying (e.g., deleting, inserting, translocating, inactivating, activating) a target DNA or RNA in a multiplicity of cell types. As such, the nucleic acid-targeting complex of the invention has a broad spectrum of applications in, e.g., gene therapy, drug screening, disease diagnosis, and prognosis. An exemplary nucleic acid-targeting complex comprises a DNA or RNA-targeting effector protein complexed with a ωRNA hybridized to a target sequence within the target locus of interest.

[0439] In one embodiment, this invention provides a method of cleaving a target polynucleotide. The method may comprise modifying a target polynucleotide using a nucleic acid-targeting complex that binds to the target polynucleotide and effect cleavage of said target polynucleotide. In an embodiment, the nucleic acid-targeting complex of the invention, when introduced into a cell, may create a break (e.g., a single strand break) in the polynucleotide sequence. For example, the method can be used to cleave a disease polynucleotide in a cell. For example, an exogenous template comprising a sequence to be integrated flanked by an upstream sequence and a downstream sequence may be introduced into a cell. The upstream and downstream sequences share sequence similarity with either side of the site of integration in the polynucleotide. The exogenous template comprises a sequence to be integrated (e.g., a mutated RNA). The sequence for integration may be a sequence endogenous or exogenous to the cell. Examples of a sequence to be integrated include polynucleotide encoding a protein or a non-coding RNA (e.g., a microRNA). Thus, the sequence for integration may be operably linked to an appropriate control sequence or sequences. Alternatively, the sequence to be integrated may provide a regulatory function. The upstream and downstream sequences in the recombination template are selected to promote recombination between the RNA sequence of interest and the recombination. The upstream sequence is a polynucleotide sequence that shares sequence similarity with the sequence upstream of the targeted site for integration. Similarly, the downstream sequence is a polynucleotide sequence that shares sequence similarity with the polynucleotide sequence downstream of the targeted site of integration. The upstream and downstream sequences in the recombination template can have 75%, 80%, 85%, 90%, 95%, or 100% sequence identity with the targeted sequence. Preferably, the upstream and downstream sequences in the recombination template have about 95%, 96%, 97%, 98%, 99%, or 100% sequence identity with the targeted sequence. In some methods, the upstream and downstream sequences in the recombination template have about 99% or 100% sequence identity with the targeted sequence. An upstream or downstream sequence may comprise from about 20 bp to about 2500 bp, for example, about 50, 100, 200, 300, 400, 500, 600, 700, 800, 900, 1000, 1100, 1200, 1300, 1400, 1500, 1600, 1700, 1800, 1900, 2000, 2100, 2200, 2300, 2400, or 2500 bp. In some methods, the exemplary upstream or downstream sequence have about 200 bp to about 2000 bp, about 600 bp to about 1000 bp, or more particularly about 700 bp to about 1000 bp. In some methods, the recombination template may further comprise a marker. Such a marker may make it easy to screen for targeted integrations. Examples of suitable markers include restriction sites, fluorescent proteins, or selectable markers. The recombination template of the invention can be constructed using recombinant techniques (see, for example, Sambrook et al., 2001 and Ausubel et al., 1996). In a method for modifying a target sequence by integrating an recombination template, a break (e.g., double or single stranded break in double or single stranded DNA or RNA) is introduced into the DNA or RNA sequence by the nucleic acid-targeting complex, the break is repaired via homologous recombination with an recombination template such that the template is integrated into the target. The presence of a double-stranded break facilitates integration of the template. In other embodiments, this invention provides a method of modifying expression of a RNA in a eukaryotic cell. The method comprises increasing or decreasing expression of a target polynucleotide by using a nucleic acid-targeting complex that binds to the DNA or RNA (e.g., mRNA or pre-mRNA). In some methods, a target can be inactivated to affect the modification of the expression in a cell. For example, upon the binding of a nucleic acid-targeting complex to a target sequence in a cell, the target is inactivated such that the sequence is not translated, the coded protein is not produced, or the sequence does not function as the wild-type sequence does. For example, a protein or microRNA coding sequence may be inactivated such that the protein or microRNA or pre-microRNA transcript is not produced. The target of a nucleic acid-targeting complex can be any polynucleotide endogenous or exogenous to the eukaryotic cell. For example, the target polynucleotide can be a polynucleotide residing in the nucleus of the eukaryotic cell. The target polynucleotide can be a sequence coding a gene product (e.g., a protein) or a non-coding sequence (e.g., ncRNA, lncRNA, tRNA, or rRNA). Examples of target RNA include a sequence associated with a signaling biochemical pathway, e.g., a signaling biochemical pathway-associated polynucleotide. Examples of target polynucleotide include a disease associated polynucleotide. A “disease-associated” polynucleotide refers to any polynucleotide which is yielding translation products at an abnormal level or in an abnormal form in cells derived from a disease-affected tissues compared with tissues or cells of a non-disease control. It may be a gene that becomes expressed at an abnormally high level; it may be a gene that becomes expressed at an abnormally low level, where the altered expression correlates with the occurrence and/or progression of the disease. A disease-associated polynucleotide also refers to a gene possessing mutation(s) or genetic variation that is directly responsible or is in linkage disequilibrium with a gene(s) that is responsible for the etiology of a disease. The translated products may be known or unknown, and may be at a normal or abnormal level. The target RNA of a nucleic acid-targeting complex can be any polynucleotide endogenous or exogenous to the eukaryotic cell. For example, the target RNA can be a RNA residing in the nucleus of the eukaryotic cell. The target polynucleotide can be a sequence coding a gene product (e.g., a protein) or a non-coding sequence (e.g., ncRNA, lncRNA, tRNA, or rRNA).

[0440] In one embodiment, the method may comprise allowing a composition to bind to the target DNA or RNA to effect cleavage of said target DNA or RNA thereby modifying the target DNA or RNA, wherein the nucleic acid-targeting complex comprises a nucleic acid-targeting effector protein complexed with a ωRNA hybridized to a target sequence within said target DNA or RNA. In one aspect, the invention provides a method of modifying expression of DNA or RNA in a eukaryotic cell. In one embodiment, the method comprises allowing a nucleic acid-targeting complex to bind to the DNA or RNA such that said binding results in increased or decreased expression of said DNA or RNA; wherein the nucleic acid-targeting complex comprises a nucleic acid-targeting effector protein complexed with a ωRNA. Similar considerations and conditions apply as above for methods of modifying a target DNA or RNA. In fact, these sampling, culturing and re-introduction options apply across the aspects of the present invention. In one aspect, the invention provides for methods of modifying a target DNA or RNA in a eukaryotic cell, which may be in vivo, ex vivo or in vitro. In one embodiment, the method comprises sampling a cell or population of cells from a human or non-human animal, and modifying the cell or cells. Culturing may occur at any stage ex vivo. The cell or cells may even be re-introduced into the non-human animal or plant. For re-introduced cells it is particularly preferred that the cells are stem cells. The compositions as described in any embodiment herein may be used to detect nucleic acid identifiers. Nucleic acid identifiers are non-coding nucleic acids that may be used to identify a particular article. Example nucleic acid identifiers, such as DNA watermarks, are described in Heider and Barnekow. “DNA watermarks: A proof of concept” BMC Molecular Biology 9:40 (2008). The nucleic acid identifiers may also be a nucleic acid barcode. A nucleic-acid based barcode is a short sequence of nucleotides (for example, DNA, RNA, or combinations thereof) that is used as an identifier for an associated molecule, such as a target molecule and/or target nucleic acid. A nucleic acid barcode can have a length of at least, for example, 4, 5, 6, 7, 8, 9, 10, 11, 12, 13, 14, 15, 16, 17, 18, 19, 20, 21, 22, 23, 24, 25, 26, 27, 28, 29, 30, 35, 40, 45, 50, 60, 70, 80, 90, or 100 nucleotides, and can be in single- or double-stranded form. One or more nucleic acid barcodes can be attached, or “tagged,” to a target molecule and/or target nucleic acid. This attachment can be direct (for example, covalent or non-covalent binding of the barcode to the target molecule) or indirect (for example, via an additional molecule, for example, a specific binding agent, such as an antibody (or other protein) or a barcode receiving adaptor (or other nucleic acid molecule). Target molecule and/or target nucleic acids can be labeled with multiple nucleic acid barcodes in combinatorial fashion, such as a nucleic acid barcode concatemer. Typically, a nucleic acid barcode is used to identify target molecules and/or target nucleic acids as being from a particular compartment (for example a discrete volume), having a particular physical property (for example, affinity, length, sequence, etc.), or having been subject to certain treatment conditions. Target molecule and/or target nucleic acid can be associated with multiple nucleic acid barcodes to provide information about all of these features (and more). Methods of generating nucleic acid-barcodes are disclosed, for example, in International Patent Application Publication No. WO/2014/047561.

[0441] In an embodiment, compositions induce a single strand break for the purpose of inducing HDR-mediated correction. In a further embodiment, two or more guide RNAs complexing with IsrB polypeptide nuclease or an ortholog or homolog thereof, may be used to induce multiplexed breaks for purpose of inducing HDR-mediated correction.

[0442] A recombination template nucleic acid, as that term is used herein, refers to a nucleic acid sequence which can be used in conjunction with compositions discloser herein to alter the structure of a target position. In an embodiment, the target nucleic acid is modified to have some or all of the sequence of the recombination template nucleic acid, typically at or near cleavage site(s). In an embodiment, the recombination template nucleic acid is single stranded. In an alternate embodiment, the recombination template nucleic acid is double stranded. In an embodiment, the recombination template nucleic acid is DNA, e.g., double stranded DNA. In an alternate embodiment, the recombination template nucleic acid is single stranded DNA.

[0443] In one embodiment, a recombination template is provided to serve as a template in homologous recombination, such as within or near a target sequence nicked or cleaved by a nucleic acid-targeting effector protein as a part of a nucleic acid-targeting complex.

[0444] A recombination template may be a component of another vector as described herein, contained in a separate vector, or provided as a separate polynucleotide. A recombination template polynucleotide may be of any suitable length, such as about or more than about 10, 15, 20, 25, 50, 75, 100, 150, 200, 500, 1000, or more nucleotides in length. In one embodiment, the recombination template polynucleotide is complementary to a portion of a polynucleotide comprising the target sequence. When optimally aligned, a recombination template polynucleotide might overlap with one or more nucleotides of a target sequences (e.g. about or more than about 1, 5, 10, 15, 20, 25, 30, 35, 40, 45, 50, 60, 70, 80, 90, 100 or more nucleotides). In one embodiment, when a recombination template sequence and a polynucleotide comprising a target sequence are optimally aligned, the nearest nucleotide of the recombination template polynucleotide is within about 1, 5, 10, 15, 20, 25, 50, 75, 100, 200, 300, 400, 500, 1000, 5000, 10000, or more nucleotides from the target sequence.

[0445] In an embodiment, the recombination template nucleic acid alters the structure of the target position by participating in homologous recombination. In an embodiment, the recombination template nucleic acid alters the sequence of the target position. In an embodiment, the recombination template nucleic acid results in the incorporation of a modified, or non-naturally occurring base into the target nucleic acid.

[0446] The recombination template sequence may undergo a breakage mediated or catalyzed recombination with the target sequence. In an embodiment, the recombination template nucleic acid may include sequence that corresponds to a site on the target sequence that is cleaved by an IsrB polypeptide nuclease mediated cleavage event. In an embodiment, the recombination template nucleic acid may include sequence that corresponds to both, a first site on the target sequence that is cleaved in a first IsrB polypeptide nuclease mediated event and a second site on the target sequence that is cleaved in a second IsrB polypeptide nuclease mediated event.

[0447] In an embodiment, the recombination template nucleic acid can include sequence which results in an alteration in the coding sequence of a translated sequence, e.g., one which results in the substitution of one amino acid for another in a protein product, e.g., transforming a mutant allele into a wild type allele, transforming a wild type allele into a mutant allele, and/or introducing a stop codon, insertion of an amino acid residue, deletion of an amino acid residue, or a nonsense mutation. In an embodiment, the recombination template nucleic acid can include sequence which results in an alteration in a non-coding sequence, e.g., an alteration in an exon or in a 5′ or 3′ non-translated or non-transcribed region. Such alterations include an alteration in a control element, e.g., a promoter, enhancer, and an alteration in a cis-acting or trans-acting control element.

[0448] A recombination template nucleic acid having homology with a target position in a target gene may be used to alter the structure of a target sequence. The recombination template sequence may be used to alter an unwanted structure, e.g., an unwanted or mutant nucleotide. The recombination template nucleic acid may include sequence which, when integrated, results in: decreasing the activity of a positive control element; increasing the activity of a positive control element; decreasing the activity of a negative control element; increasing the activity of a negative control element; decreasing the expression of a gene; increasing the expression of a gene; increasing resistance to a disorder or disease; increasing resistance to viral entry; correcting a mutation or altering an unwanted amino acid residue conferring, increasing, abolishing or decreasing a biological property of a gene product, e.g., increasing the enzymatic activity of an enzyme, or increasing the ability of a gene product to interact with another molecule.

[0449] The recombination template nucleic acid may include sequence which results in: a change in sequence of 1, 2, 3, 4, 5, 6, 7, 8, 9, 10, 1 1, 12 or more nucleotides of the target sequence. In an embodiment, the recombination template nucleic acid may be 20+/−10, 30+/−10, 40+/−10, 50+/−10, 60+/−10, 70+/−10, 80+/−10, 90+/−10, 100+/−10, 1 10+/−10, 120+/−10, 130+/−10, 140+/−10, 150+/−10, 160+/−10, 170+/−10, 1 80+/−10, 190+/−10, 200+/−10, 210+/−10, of 220+/−10 nucleotides in length. In an embodiment, the t recombination template nucleic acid may be 30+/−20, 40+/−20, 50+/−20, 60+/−20, 70+/−20, 80+/−20, 90+/−20, 100+/−20, 1 10+/−20, 120+/−20, 130+/−20, 140+/−20, I 50+/−20, 160+/−20, 170+/−20, 180+/−20, 190+/−20, 200+/−20, 210+/−20, of 220+/−20 nucleotides in length. In an embodiment, the recombination template nucleic acid is 10 to 1,000, 20 to 900, 30 to 800, 40 to 700, 50 to 600, 50 to 500, 50 to 400, 50 to 300, 50 to 200, or 50 to 100 nucleotides in length.

[0450] A recombination template nucleic acid comprises the following components: [5′ homology arm]-[replacement sequence]-[3′ homology arm]. The homology arms provide for recombination into the chromosome, thus replacing the undesired element, e.g., a mutation or signature, with the replacement sequence. In an embodiment, the homology arms flank the most distal cleavage sites. In an embodiment, the 3′ end of the 5′ homology arm is the position next to the 5′ end of the replacement sequence. In an embodiment, the 5′ homology arm can extend at least 10, 20, 30, 40, 50, 100, 200, 300, 400, 500, 600, 700, 800, 900, 1000, 1500, or 2000 nucleotides 5′ from the 5′ end of the replacement sequence. In an embodiment, the 5′ end of the 3′ homology arm is the position next to the 3′ end of the replacement sequence. In an embodiment, the 3′ homology arm can extend at least 10, 20, 30, 40, 50, 100, 200, 300, 400, 500, 600, 700, 800, 900, 1000, 1500, or 2000 nucleotides 3′ from the 3′ end of the replacement sequence.

[0451] In an embodiment, one or both homology arms may be shortened to avoid including certain sequence repeat elements. For example, a 5′ homology arm may be shortened to avoid a sequence repeat element. In other embodiments, a 3′ homology arm may be shortened to avoid a sequence repeat element. In one embodiment, both the 5′ and the 3′ homology arms may be shortened to avoid including certain sequence repeat elements.

[0452] In an embodiment, a recombination template nucleic acids for correcting a mutation may designed for use as a single-stranded oligonucleotide. When using a single-stranded oligonucleotide, 5′ and 3′ homology arms may range up to about 200 base pairs (bp) in length, e.g., at least 25, 50, 75, 100, 125, 150, 175, or 200 bp in length.

[0453] Unlike IsrB polypeptide nuclease-mediated gene knockout, which permanently eliminates expression by mutating the gene at the DNA level, IsrB polypeptide nuclease knockdown allows for temporary reduction of gene expression through the use of artificial transcription factors. Mutating key residues in both DNA cleavage domains of the IsrB polypeptide nuclease, results in the generation of a catalytically inactive IsrB polypeptide nuclease. A catalytically inactive IsrB polypeptide nuclease complexes with a ωRNA and localizes to the DNA sequence specified by that guide RNA's targeting domain, however, it does not cleave the target DNA. Fusion of the inactive IsrB polypeptide nuclease protein to an effector domain, e.g., a transcription repression domain, enables recruitment of the effector to any DNA site specified by the ωRNA. In an embodiment, IsrB polypeptide nuclease may be fused to a transcriptional repression domain and recruited to the promoter region of a gene. Especially for gene repression, it is contemplated herein that blocking the binding site of an endogenous transcription factor would aid in downregulating gene expression. In another embodiment, an inactive IsrB polypeptide nuclease can be fused to a chromatin modifying protein. Altering chromatin status can result in decreased expression of the target gene.

[0454] In an embodiment, a ωRNA molecule can be targeted to a known transcription response elements (e.g., promoters, enhancers, etc.), a known upstream activating sequences, and/or sequences of unknown or known function that are suspected of being able to control expression of the target DNA.

[0455] In some methods, a target polynucleotide can be inactivated to affect the modification of the expression in a cell. For example, upon the binding of a composition to a target sequence in a cell, the target polynucleotide is inactivated such that the sequence is not transcribed, the coded protein is not produced, or the sequence does not function as the wild-type sequence does. For example, a protein or microRNA coding sequence may be inactivated such that the protein is not produced.

### Non-Homologous End-Joining

[0456] In an embodiment, nuclease-induced non-homologous end-joining (NHEJ) can be used to target gene-specific knockouts. Nuclease-induced NHEJ can also be used to remove (e.g., delete) sequence in a gene of interest. Generally, NHEJ repairs a double-strand break in the DNA by joining together the two ends; however, generally, the original sequence is restored only if two compatible ends, exactly as they were formed by the double-strand break, are perfectly ligated. The DNA ends of the double-strand break are frequently the subject of enzymatic processing, resulting in the addition or removal of nucleotides, at one or both strands, prior to rejoining of the ends. This results in the presence of insertion and/or deletion (indel) mutations in the DNA sequence at the site of the NHEJ repair. Two-thirds of these mutations typically alter the reading frame and, therefore, produce a non-functional protein. Additionally, mutations that maintain the reading frame, but which insert or delete a significant amount of sequence, can destroy functionality of the protein. This is locus dependent as mutations in critical functional domains are likely less tolerable than mutations in non-critical regions of the protein. The indel mutations generated by NHEJ are unpredictable in nature; however, at a given break site certain indel sequences are favored and are over-represented in the population, likely due to small regions of microhomology. The lengths of deletions can vary widely; most commonly in the 1-50 bp range, but they can easily be greater than 50 bp, e.g., they can easily reach greater than about 100-200 bp. Insertions tend to be shorter and often include short duplications of the sequence immediately surrounding the break site. However, it is possible to obtain large insertions, and in these cases, the inserted sequence has often been traced to other regions of the genome or to plasmid DNA present in the cells.

[0457] Because NHEJ is a mutagenic process, it may also be used to delete small sequence motifs as long as the generation of a specific final sequence is not required. If a double-strand break is targeted near to a short target sequence, the deletion mutations caused by the NHEJ repair often span, and therefore remove, the unwanted nucleotides. For the deletion of larger DNA segments, introducing two double-strand breaks, one on each side of the sequence, can result in NHEJ between the ends with removal of the entire intervening sequence. Both of these approaches can be used to delete specific DNA sequences; however, the error-prone nature of NHEJ may still produce indel mutations at the site of repair.

[0458] Both double strand cleaving IscB polypeptide nuclease, or an ortholog or homolog thereof, and single strand, or nickase, IscB polypeptide nuclease, or an ortholog or homolog thereof, molecules can be used in the methods and compositions described herein to generate NHEJ-mediated indels. NHEJ-mediated indels targeted to the gene, e.g., a coding region, e.g., an early coding region of a gene of interest can be used to knockout (i.e., eliminate expression of) a gene of interest. For example, early coding region of a gene of interest includes sequence immediately following a transcription start site, within a first exon of the coding sequence, or within 500 bp of the transcription start site (e.g., less than 500, 450, 400, 350, 300, 250, 200, 150, 100 or 50 bp).

[0459] In an embodiment, in which a ωRNA and IsrB polypeptide nuclease, or an ortholog or homolog thereof, generate a single strand break for the purpose of inducing NHEJ-mediated indels, a ωRNA may be configured to position one double-strand break in close proximity to a nucleotide of the target position. In an embodiment, the cleavage site may be between 0-500 bp away from the target position (e.g., less than 500, 400, 300, 200, 100, 50, 40, 30, 25, 20, 15, 10, 9, 8, 7, 6, 5, 4, 3, 2 or 1 bp from the target position).

[0460] In an embodiment, in which two ωRNAs complexing with IsrB polypeptide nuclease, or an ortholog or homolog thereof, e.g., IsrB polypeptide nickases induce two single strand breaks for the purpose of inducing NHEJ-mediated indels, two ωRNAs may be configured to position two single-strand breaks to provide for NHEJ repair a nucleotide of the target position.

[0461] In some examples, the systems herein may introduce one or more indels via NHEJ pathway and insert sequence from a combination template via HDR.

### Exemplary Applications

[0462] The invention provides a non-naturally occurring or engineered composition, or one or more polynucleotides encoding components of said composition, or vector or delivery systems comprising one or more polynucleotides encoding components of said composition for use in a modifying a target cell in vivo, ex vivo or in vitro and, may be conducted in a manner alters the cell such that once modified the progeny or cell line of the IsrB polypeptide nuclease modified cell retains the altered phenotype. The modified cells and progeny may be part of a multi-cellular organism such as a plant or animal with ex vivo or in vivo application of composition to desired cell types. The methods herein include a therapeutic method of treatment. The therapeutic method of treatment may comprise gene or genome editing, or gene therapy.

[0463] In one embodiment, one or more vectors described herein are used to produce a non-human transgenic animal or transgenic plant. In one embodiment, the transgenic animal is a mammal, such as a mouse, rat, or rabbit. Methods for producing transgenic animals and plants are known in the art, and generally begin with a method of cell transfection, such as described herein.

### Detection Methods Such as FISH

[0464] In one aspect, the invention provides an engineered, non-naturally occurring composition comprising a catalytically inactive IsrB polypeptide nuclease described herein, and use this system in detection methods such as fluorescence in situ hybridization (FISH). A dead IsrB polypeptide nuclease which lacks the ability to produce DNA single-strand breaks may be fused with a marker, such as fluorescent protein, such as the enhanced green fluorescent protein (eEGFP) and co-expressed with small guide RNAs to target pericentric, centric and teleomeric repeats in vivo. The dead IsrB polypeptide nuclease system can be used to visualize both repetitive sequences and individual genes in the human genome. Such new applications of labelled dead IsrB polypeptide nuclease may be important in imaging cells and studying the functional nuclear architecture, especially in cases with a small nucleus volume or complex 3-D structures. (Chen B, Gilbert L A, Cimini B A, Schnitzbauer J, Zhang W, Li G W, Park J, Blackburn E H, Weissman J S, Qi L S, Huang B. 2013. Dynamic imaging of genomic loci in living human cells by an optimized CRISPR/Cas system. Cell 155 (7): 1479-91. doi: 10.1016/j.cell.2013.12.001.)

### Patient-Specific Screening Methods

[0465] A nucleic acid-targeting system that targets DNA, e.g., trinucleotide repeats can be used to screen patients or patent samples for the presence of such repeats. The repeats can be the target of the RNA of the nucleic acid-targeting system, and if there is binding thereto by the nucleic acid-targeting system, that binding can be detected, to thereby indicate that such a repeat is present. Thus, a nucleic acid-targeting system can be used to screen patients or patient samples for the presence of the repeat. The patient can then be administered suitable compound(s) to address the condition; or, can be administered a nucleic acid-targeting system to bind to and cause insertion, deletion or mutation and alleviate the condition.

### Models of Genetic and Epigenetic Conditions

[0466] A method of the invention may be used to create a plant, an animal or cell that may be used to model and/or study genetic or epigenetic conditions of interest, such as a through a model of mutations of interest or a disease model. As used herein, “disease” refers to a disease, disorder, or indication in a subject. For example, a method of the invention may be used to create an animal or cell that comprises a modification in one or more nucleic acid sequences associated with a disease, or a plant, animal or cell in which the expression of one or more nucleic acid sequences associated with a disease are altered. Such a nucleic acid sequence may encode a disease associated protein sequence or may be a disease associated control sequence. Accordingly, it is understood that in embodiments of the invention, a plant, subject, patient, organism or cell can be a non-human subject, patient, organism or cell. Thus, the invention provides a plant, animal or cell, produced by the present methods, or a progeny thereof. The progeny may be a clone of the produced plant or animal, or may result from sexual reproduction by crossing with other individuals of the same species to introgress further desirable traits into their offspring. The cell may be in vivo or ex vivo in the cases of multicellular organisms, particularly animals or plants. In the instance where the cell is in cultured, a cell line may be established if appropriate culturing conditions are met and preferably if the cell is suitably adapted for this purpose (for instance a stem cell). Bacterial cell lines produced by the invention are also envisaged. Hence, cell lines are also envisaged.

[0467] In some methods, the disease model can be used to study the effects of mutations on the animal or cell and development and/or progression of the disease using measures commonly used in the study of the disease. Alternatively, such a disease model is useful for studying the effect of a pharmaceutically active compound on the disease.

[0468] In some methods, the disease model can be used to assess the efficacy of a potential gene therapy strategy. That is, a disease-associated gene or polynucleotide can be modified such that the disease development and/or progression is inhibited or reduced. In particular, the method comprises modifying a disease-associated gene or polynucleotide such that an altered protein is produced and, as a result, the animal or cell has an altered response. Accordingly, in some methods, a genetically modified animal may be compared with an animal predisposed to development of the disease such that the effect of the gene therapy event may be assessed.

[0469] In another embodiment, this invention provides a method of developing a biologically active agent that modulates a cell signaling event associated with a disease gene. The method comprises contacting a test compound with a cell comprising one or more vectors that drive expression of one or more of a IsrB polypeptide nuclease, and a conserved nucleotide sequence linked to a ωRNA sequence; and detecting a change in a readout that is indicative of a reduction or an augmentation of a cell signaling event associated with, e.g., a mutation in a disease gene contained in the cell.

[0470] A cell model or animal model can be constructed in combination with the method of the invention for screening a cellular function change. Such a model may be used to study the effects of a genome sequence modified by the complex of the invention on a cellular function of interest. For example, a cellular function model may be used to study the effect of a modified genome sequence on intracellular signaling or extracellular signaling. Alternatively, a cellular function model may be used to study the effects of a modified genome sequence on sensory perception. In some such models, one or more genome sequences associated with a signaling biochemical pathway in the model are modified.

[0471] Several disease models have been specifically investigated. These include de novo autism risk genes CHD8, KATNAL2, and SCN2A; and the syndromic autism (Angelman Syndrome) gene UBE3A. These genes and resulting autism models are of course preferred, but serve to show the broad applicability of the invention across genes and corresponding models. An altered expression of one or more genome sequences associated with a signaling biochemical pathway can be determined by assaying for a difference in the mRNA levels of the corresponding genes between the test model cell and a control cell, when they are contacted with a candidate agent. Alternatively, the differential expression of the sequences associated with a signaling biochemical pathway is determined by detecting a difference in the level of the encoded polypeptide or gene product.

[0472] To assay for an agent-induced alteration in the level of mRNA transcripts or corresponding polynucleotides, nucleic acid contained in a sample is first extracted according to standard methods in the art. For instance, mRNA can be isolated using various lytic enzymes or chemical solutions according to the procedures set forth in Sambrook et al. (1989), or extracted by nucleic-acid-binding resins following the accompanying instructions provided by the manufacturers. The mRNA contained in the extracted nucleic acid sample is then detected by amplification procedures or conventional hybridization assays (e.g. Northern blot analysis) according to methods widely known in the art or based on the methods exemplified herein.

[0473] For purpose of this invention, amplification means any method employing a primer and a polymerase capable of replicating a target sequence with reasonable fidelity. Amplification may be carried out by natural or recombinant DNA polymerases such as TaqGold™, T7 DNA polymerase, Klenow fragment of E. coli DNA polymerase, and reverse transcriptase. A preferred amplification method is PCR. In particular, the isolated RNA can be subjected to a reverse transcription assay that is coupled with a quantitative polymerase chain reaction (RT-PCR) in order to quantify the expression level of a sequence associated with a signaling biochemical pathway.

[0474] Detection of the gene expression level can be conducted in real time in an amplification assay. In one aspect, the amplified products can be directly visualized with fluorescent DNA-binding agents including but not limited to DNA intercalators and DNA groove binders. Because the amount of the intercalators incorporated into the double-stranded DNA molecules is typically proportional to the amount of the amplified DNA products, one can conveniently determine the amount of the amplified products by quantifying the fluorescence of the intercalated dye using conventional optical systems in the art. DNA-binding dye suitable for this application include SYBR green, SYBR blue, DAPI, propidium iodine, Hoeste, SYBR gold, ethidium bromide, acridines, proflavine, acridine orange, acriflavine, fluorcoumanin, ellipticine, daunomycin, chloroquine, distamycin D, chromomycin, homidium, mithramycin, ruthenium polypyridyls, anthramycin, and the like.

[0475] In another aspect, other fluorescent labels such as sequence specific probes can be employed in the amplification reaction to facilitate the detection and quantification of the amplified products. Probe-based quantitative amplification relies on the sequence-specific detection of a desired amplified product. It utilizes fluorescent, target-specific probes (e.g., TaqMan® probes) resulting in increased specificity and sensitivity. Methods for performing probe-based quantitative amplification are well established in the art and are taught in U.S. Pat. No. 5,210,015.

[0476] In yet another aspect, conventional hybridization assays using hybridization probes that share sequence homology with sequences associated with a signaling biochemical pathway can be performed. Typically, probes are allowed to form stable complexes with the sequences associated with a signaling biochemical pathway contained within the biological sample derived from the test subject in a hybridization reaction. It will be appreciated by one of skill in the art that where antisense is used as the probe nucleic acid, the target polynucleotides provided in the sample are chosen to be complementary to sequences of the antisense nucleic acids. Conversely, where the nucleotide probe is a sense nucleic acid, the target polynucleotide is selected to be complementary to sequences of the sense nucleic acid.

[0477] Hybridization can be performed under conditions of various stringency. Suitable hybridization conditions for the practice of the present invention are such that the recognition interaction between the probe and sequences associated with a signaling biochemical pathway is both sufficiently specific and sufficiently stable. Conditions that increase the stringency of a hybridization reaction are widely known and published in the art. See, for example, (Sambrook, et al., (1989); Nonradioactive In Situ Hybridization Application Manual, Boehringer Mannheim, second edition). The hybridization assay can be formed using probes immobilized on any solid support, including but are not limited to nitrocellulose, glass, silicon, and a variety of gene arrays. A preferred hybridization assay is conducted on high-density gene chips as described in U.S. Pat. No. 5,445,934.

[0478] For a convenient detection of the probe-target complexes formed during the hybridization assay, the nucleotide probes are conjugated to a detectable label. Detectable labels suitable for use in the present invention include any composition detectable by photochemical, biochemical, spectroscopic, immunochemical, electrical, optical or chemical means. A wide variety of appropriate detectable labels are known in the art, which include fluorescent or chemiluminescent labels, radioactive isotope labels, enzymatic or other ligands. In preferred embodiments, one will likely desire to employ a fluorescent label or an enzyme tag, such as digoxigenin, β-galactosidase, urease, alkaline phosphatase or peroxidase, avidin/biotin complex.

[0479] The detection methods used to detect or quantify the hybridization intensity will typically depend upon the label selected above. For example, radiolabels may be detected using photographic film or a phosphoimager. Fluorescent markers may be detected and quantified using a photodetector to detect emitted light. Enzymatic labels are typically detected by providing the enzyme with a substrate and measuring the reaction product produced by the action of the enzyme on the substrate; and finally colorimetric labels are detected by simply visualizing the colored label.

[0480] An agent-induced change in expression of sequences associated with a signaling biochemical pathway can also be determined by examining the corresponding gene products. Determining the protein level typically involves a) contacting the protein contained in a biological sample with an agent that specifically bind to a protein associated with a signaling biochemical pathway; and (b) identifying any agent: protein complex so formed. In one aspect of this embodiment, the agent that specifically binds a protein associated with a signaling biochemical pathway is an antibody, preferably a monoclonal antibody.

[0481] The reaction is performed by contacting the agent with a sample of the proteins associated with a signaling biochemical pathway derived from the test samples under conditions that will allow a complex to form between the agent and the proteins associated with a signaling biochemical pathway. The formation of the complex can be detected directly or indirectly according to standard procedures in the art. In the direct detection method, the agents are supplied with a detectable label and unreacted agents may be removed from the complex; the amount of remaining label thereby indicating the amount of complex formed. For such method, it is preferable to select labels that remain attached to the agents even during stringent washing conditions. It is preferable that the label does not interfere with the binding reaction. In the alternative, an indirect detection procedure may use an agent that contains a label introduced either chemically or enzymatically. A desirable label generally does not interfere with binding or the stability of the resulting agent: polypeptide complex. However, the label is typically designed to be accessible to an antibody for an effective binding and, hence generating a detectable signal.

[0482] A wide variety of labels suitable for detecting protein levels are known in the art. Non-limiting examples include radioisotopes, enzymes, colloidal metals, fluorescent compounds, bioluminescent compounds, and chemiluminescent compounds.

[0483] The amount of agent: polypeptide complexes formed during the binding reaction can be quantified by standard quantitative assays. As illustrated above, the formation of agent: polypeptide complex can be measured directly by the amount of label remained at the site of binding. In an alternative, the protein associated with a signaling biochemical pathway is tested for its ability to compete with a labeled analog for binding sites on the specific agent. In this competitive assay, the amount of label captured is inversely proportional to the amount of protein sequences associated with a signaling biochemical pathway present in a test sample.

[0484] A number of techniques for protein analysis based on the general principles outlined above are available in the art. They include but are not limited to radioimmunoassay, ELISA (enzyme linked immunoradiometric assays), “sandwich” immunoassays, immunoradiometric assays, in situ immunoassays (using e.g., colloidal gold, enzyme or radioisotope labels), western blot analysis, immunoprecipitation assays, immunofluorescent assays, and SDS-PAGE.

[0485] Antibodies that specifically recognize or bind to proteins associated with a signaling biochemical pathway are preferable for conducting the aforementioned protein analyses. Where desired, antibodies that recognize a specific type of post-translational modifications (e.g., signaling biochemical pathway inducible modifications) can be used. Post-translational modifications include but are not limited to glycosylation, lipidation, acetylation, and phosphorylation. These antibodies may be purchased from commercial vendors. For example, anti-phosphotyrosine antibodies that specifically recognize tyrosine-phosphorylated proteins are available from a number of vendors including Invitrogen and Perkin Elmer. Anti-phosphotyrosine antibodies are particularly useful in detecting proteins that are differentially phosphorylated on their tyrosine residues in response to an ER stress. Such proteins include but are not limited to eukaryotic translation initiation factor 2 alpha (eIF-2a). Alternatively, these antibodies can be generated using conventional polyclonal or monoclonal antibody technologies by immunizing a host animal or an antibody-producing cell with a target protein that exhibits the desired post-translational modification.

### Genome Wide Knock-Out Screening

[0486] The IsrB polypeptide nuclease and systems described herein can be used to perform efficient and cost effective functional genomic screens. Such screens can utilize IsrB polypeptide nuclease-based genome wide libraries. Such screens and libraries can provide for determining the function of genes, cellular pathways genes are involved in, and how any alteration in gene expression can result in a particular biological process. An advantage of the present invention is that the composition avoids off-target binding and its resulting side effects. This is achieved using systems arranged to have a high degree of sequence specificity for the target DNA. In preferred embodiments of the invention, the IsrB polypeptide nuclease complexes are IsrB polypeptide nuclease complexes.

[0487] In embodiments of the invention, a genome wide library may comprise a plurality of IsrB polypeptide nuclease @ RNAs, as described herein, comprising guide sequences that are capable of targeting a plurality of target sequences in a plurality of genomic loci in a population of eukaryotic cells. The population of cells may be a population of embryonic stem (ES) cells. The target sequence in the genomic locus may be a non-coding sequence. The non-coding sequence may be an intron, regulatory sequence, splice site, 3′ UTR, 5′ UTR, or polyadenylation signal. Gene function of one or more gene products may be altered by said targeting. The targeting may result in a knockout of gene function. The targeting of a gene product may comprise more than one ωRNA. A gene product may be targeted by 2, 3, 4, 5, 6, 7, 8, 9, or 10 ωRNAs, preferably 3 to 4 per gene. Off-target modifications may be minimized by exploiting the staggered double strand breaks generated by IsrB polypeptide nuclease complexes or by utilizing methods analogous to those used in composition (See, e.g., DNA targeting specificity of RNA-guided Cas nucleases. Hsu, P., Scott, D., Weinstein, J., Ran, F A., Konermann, S., Agarwala, V., Li, Y., Fine, E., Wu, X., Shalem, O., Cradick, T J., Marraffini, L A., Bao, G., & Zhang, F. Nat Biotechnol doi: 10.1038/nbt.2647 (2013)), incorporated herein by reference. The targeting may be of about 100 or more sequences. The targeting may be of about 1000 or more sequences. The targeting may be of about 20,000 or more sequences. The targeting may be of the entire genome. The targeting may be of a panel of target sequences focused on a relevant or desirable pathway. The pathway may be an immune pathway. The pathway may be a cell division pathway.

[0488] One aspect of the invention comprehends a genome wide library that may comprise a plurality of ωRNAs that may comprise guide sequences that are capable of targeting a plurality of target sequences in a plurality of genomic loci, wherein said targeting results in a knockout of gene function. This library may potentially comprise @guide RNAs that target each and every gene in the genome of an organism.

[0489] In one embodiment of the invention, the organism or subject is a eukaryote (including mammal including human) or a non-human eukaryote or a non-human animal or a non-human mammal. In one embodiment, the organism or subject is a non-human animal, and may be an arthropod, for example, an insect, or may be a nematode. In some methods of the invention the organism or subject is a plant. In some methods of the invention, the organism or subject is a mammal or a non-human mammal. A non-human mammal may be for example a rodent (preferably a mouse or a rat), an ungulate, or a primate. In some methods of the invention the organism or subject is algae, including microalgae, or is a fungus.

[0490] The knockout of gene function may comprise introducing into each cell in the population of cells a vector system of one or more vectors comprising an engineered, non-naturally occurring composition herein. The guide sequence may target a unique gene in each cell, wherein the IsrB polypeptide nuclease is operably linked to a regulatory element, wherein when transcribed, the ωRNAs comprising the @sequence directs sequence-specific binding of the IsrB polypeptide nuclease to a target sequence in the genomic loci of the unique gene, inducing cleavage of the genomic loci by the IsrB polypeptide nuclease, and confirming different knockout mutations in a plurality of unique genes in each cell of the population of cells thereby generating a gene knockout cell library. The invention comprehends that the population of cells is a population of eukaryotic cells, and in a preferred embodiment, the population of cells is a population of embryonic stem (ES) cells.

[0491] The one or more vectors may be plasmid vectors. The vector may be a single vector comprising a IsrB polypeptide nuclease, a ωRNA, and optionally, a selection marker into target cells. Not being bound by a theory, the ability to simultaneously deliver a IsrB polypeptide nuclease and hRNA through a single vector enables application to any cell type of interest, without the need to first generate cell lines that express the IsrB polypeptide nuclease. The regulatory element may be an inducible promoter. The inducible promoter may be a doxycycline inducible promoter. In some methods of the invention the expression of the guide sequence is under the control of the T7 promoter and is driven by the expression of T7 polymerase. The confirming of different knockout mutations may be by whole exome sequencing. The knockout mutation may be achieved in 100 or more unique genes. The knockout mutation may be achieved in 1000 or more unique genes. The knockout mutation may be achieved in 20,000 or more unique genes. The knockout mutation may be achieved in the entire genome. The knockout of gene function may be achieved in a plurality of unique genes which function in a particular physiological pathway or condition. The pathway or condition may be an immune pathway or condition. The pathway or condition may be a cell division pathway or condition.

[0492] Useful in the practice of the instant invention utilizing IsrB polypeptide nuclease complexes are methods used in compositions and reference is made to: Genome-Scale CRISPR-Cas Knockout Screening in Human Cells. Shalem, O., Sanjana, N E., Hartenian, E., Shi, X., Scott, D A., Mikkelson, T., Heckl, D., Ebert, B L., Root, D E., Doench, J G., Zhang, F. Science December 12. (2013). [Epub ahead of print]; Published in final edited form as: Science. 2014 Jan. 3; 343 (6166): 84-87. Shalem et al. involves a new way to interrogate gene function on a genome-wide scale. Their studies showed that delivery of a genome-scale CRISPR-Cas knockout (GeCKO) library targeted 18,080 genes with 64,751 unique guide sequences enabled both negative and positive selection screening in human cells. First, the authors showed use of the GeCKO library to identify genes essential for cell viability in cancer and pluripotent stem cells. Next, in a melanoma model, the authors screened for genes whose loss is involved in resistance to vemurafenib, a therapeutic that inhibits mutant protein kinase BRAF. Their studies showed that the highest-ranking candidates included previously validated genes NF1 and MED12 as well as novel hitsNF2, CUL3, TADA2B, and TADA1. The authors observed a high level of consistency between independent guide RNAs targeting the same gene and a high rate of hit confirmation, and thus demonstrated the promise of genome-scale screening with IsrB polypeptide nuclease.

[0493] Reference is also made to US patent publication number US20140357530; and PCT Patent Publication WO2014093701, hereby incorporated herein by reference. Reference is also made to NIH Press Release of Oct. 22, 2015 entitled, “Researchers identify potential alternative to CRISPR-Cas genome editing tools: New Cas enzymes shed light on evolution of CRISPR-Cas systems, which is incorporated by reference.

### Functional Alteration and Screening

[0494] In another aspect, the present invention provides for a method of functional evaluation and screening of genes. The use of the compositions to precisely deliver functional domains, to activate or repress genes or to alter epigenetic state by precisely altering the methylation site on a specific locus of interest, can be with one or more ωRNAs applied to a single cell or population of cells or with a library applied to genome in a pool of cells ex vivo or in vivo comprising the administration or expression of a library comprising a plurality of omega RNAs (comprising guide molecules) and wherein the screening further comprises use of a IsrB polypeptide nuclease, wherein the complex comprising the IsrB polypeptide nuclease is modified to comprise a heterologous functional domain. In an aspect the invention provides a method for screening a genome comprising the administration to a host or expression in a host in vivo of a library. In an aspect the invention provides a method as herein discussed further comprising an activator administered to the host or expressed in the host. In an aspect the invention provides a method as herein discussed wherein the activator is attached to a IsrB polypeptide nuclease. In an aspect the invention provides a method as herein discussed wherein the activator is attached to the N terminus or the C terminus of the IsrB polypeptide nuclease. In an aspect the invention provides a method as herein discussed wherein the activator is attached to a ωRNA loop. In an aspect the invention provides a method as herein discussed further comprising a repressor administered to the host or expressed in the host. In an aspect the invention provides a method as herein discussed, wherein the screening comprises affecting and detecting gene activation, gene inhibition, or cleavage in the locus.

[0495] It is also preferred to target endogenous (regulatory) control elements (such as enhancers and silencers) e.g. in addition to a promoter or promoter-proximal elements. Thus, the invention can also be used to target endogenous control elements (including enhancers and silencers) in addition to targeting of the promoter. These control elements can be located upstream and downstream of the transcriptional start site (TSS), starting from 200 bp from the TSS to 100 kb away. Targeting of known control elements can be used to activate or repress the gene of interest. In some cases, a single control element can influence the transcription of multiple target genes. Targeting of a single control element could therefore be used to control the transcription of multiple genes simultaneously.

[0496] Targeting of putative control elements on the other hand (e.g. by tiling the region of the putative control element as well as 200 bp up to 100 KB around the element) can be used as a means to verify such elements (by measuring the transcription of the gene of interest) or to detect novel control elements (e.g. by tiling 100 kb upstream and downstream of the TSS of the gene of interest). In addition, targeting of putative control elements can be useful in the context of understanding genetic causes of disease. Many mutations and common SNP variants associated with disease phenotypes are located outside coding regions. Targeting of such regions with either the activation or repression systems described herein can be followed by readout of transcription of either a) a set of putative targets (e.g. a set of genes located in closest proximity to the control element) or b) whole-transcriptome readout by e.g. RNAseq or microarray. This would allow for the identification of likely candidate genes involved in the disease phenotype. Such candidate genes could be useful as novel drug targets.

[0497] Histone acetyltransferase (HAT) inhibitors are mentioned herein. However, an alternative In one embodiment is for the one or more functional domains to comprise an acetyltransferase, preferably a histone acetyltransferase. These are useful in the field of epigenomics, for example in methods of interrogating the epigenome. Methods of interrogating the epigenome may include, for example, targeting epigenomic sequences. Targeting epigenomic sequences may include the guide being directed to an epigenomic target sequence. In one embodiment, include a promoter, silencer or an enhancer sequence.

### Saturating Mutagenesis

[0498] The compositions herein can be used to perform saturating or deep scanning mutagenesis of genomic loci in conjunction with a cellular phenotype—for instance, for determining critical minimal features and discrete vulnerabilities of functional elements required for gene expression, drug resistance, and reversal of disease. By saturating or deep scanning mutagenesis is meant that every or essentially every DNA base is cut within the genomic loci. A library of Cas1 effector protein ωRNAs may be introduced into a population of cells. The library may be introduced, such that each cell receives a single hRNA. In the case where the library is introduced by transduction of a viral vector, as described herein, a low multiplicity of infection (MOI) is used. The library may include ωRNAs targeting every sequence upstream of a TAM sequence in a genomic locus. The library may include at least 100 non-overlapping genomic sequences upstream of a TAM sequence for every 1000 base pairs within the genomic locus. The library may include hRNAs targeting sequences upstream of at least one different TAM sequence. The composition may include more than one IsrB polypeptide nuclease. Any IsrB polypeptide nuclease protein as described herein, including orthologues or engineered IsrB polypeptide nuclease that recognize different TAM sequences may be used. The frequency of off target sites for a ωRNA may be less than 500. Off target scores may be generated to select ωRNAs with the lowest off target sites. Any phenotype determined to be associated with cutting at a hRNA target site may be confirmed by using ωRNAs targeting the same site in a single experiment. Validation of a target site may also be performed by using a modified IsrB polypeptide nuclease, as described herein, and two hRNAs targeting the genomic site of interest. Not being bound by a theory, a target site is a true hit if the change in phenotype is observed in validation experiments.

[0499] The genomic loci may include at least one continuous genomic region. The at least one continuous genomic region may comprise up to the entire genome. The at least one continuous genomic region may comprise a functional element of the genome. The functional element may be within a non-coding region, coding gene, intronic region, promoter, or enhancer. The at least one continuous genomic region may comprise at least 1 kb, preferably at least 50 kb of genomic DNA. The at least one continuous genomic region may comprise a transcription factor binding site. The at least one continuous genomic region may comprise a region of DNase I hypersensitivity. The at least one continuous genomic region may comprise a transcription enhancer or repressor element. The at least one continuous genomic region may comprise a site enriched for an epigenetic signature. The at least one continuous genomic DNA region may comprise an epigenetic insulator. The at least one continuous genomic region may comprise two or more continuous genomic regions that physically interact. Genomic regions that interact may be determined by ‘4C technology’. 4C technology allows the screening of the entire genome in an unbiased manner for DNA segments that physically interact with a DNA fragment of choice, as is described in Zhao et al. ((2006) Nat Genet 38, 1341-7) and in U.S. Pat. No. 8,642,295, both incorporated herein by reference in its entirety. The epigenetic signature may be histone acetylation, histone methylation, histone ubiquitination, histone phosphorylation, DNA methylation, or a lack thereof.

[0500] The compositions for saturating or deep scanning mutagenesis can be used in a population of cells. The compositions can be used in eukaryotic cells, including but not limited to mammalian and plant cells. The population of cells may be prokaryotic cells. The population of eukaryotic cells may be a population of embryonic stem (ES) cells, neuronal cells, epithelial cells, immune cells, endocrine cells, muscle cells, erythrocytes, lymphocytes, plant cells, or yeast cells.

[0501] In one aspect, the present invention provides for a method of screening for functional elements associated with a change in a phenotype. The library may be introduced into a population of cells that are adapted to contain a IsrB polypeptide nuclease. The cells may be sorted into at least two groups based on the phenotype. The phenotype may be expression of a gene, cell growth, or cell viability. The relative representation of the ωRNAs present in each group are determined, whereby genomic sites associated with the change in phenotype are determined by the representation of ωRNAs present in each group. The change in phenotype may be a change in expression of a gene of interest. The gene of interest may be upregulated, downregulated, or knocked out. The cells may be sorted into a high expression group and a low expression group. The population of cells may include a reporter construct that is used to determine the phenotype. The reporter construct may include a detectable marker. Cells may be sorted by use of the detectable marker.

[0502] In another aspect, the present invention provides for a method of screening for genomic sites associated with resistance to a chemical compound. The chemical compound may be a drug or pesticide. The library may be introduced into a population of cells that are adapted to contain a IsrB polypeptide nuclease, wherein each cell of the population contains no more than one ωRNA; the population of cells are treated with the chemical compound; and the representation of ωRNA are determined after treatment with the chemical compound at a later time point as compared to an early time point, whereby genomic sites associated with resistance to the chemical compound are determined by enrichment of ωRNAs. Representation of ωRNAs may be determined by deep sequencing methods.

[0503] Useful in the practice of the instant invention utilizing compositions are methods used in compositions and reference is made to the article entitled BCL11A enhancer dissection by Cas-mediated in situ saturating mutagenesis. Canver, M. C., Smith, E. C., Sher, F., Pinello, L., Sanjana, N. E., Shalem, O., Chen, D. D., Schupp, P. G., Vinjamur, D. S., Garcia, S. P., Luc, S., Kurita, R., Nakamura, Y., Fujiwara, Y., Maeda, T., Yuan, G., Zhang, F., Orkin, S. H., & Bauer, D. E. DOI: 10.1038/nature15521, published online Sep. 16, 2015, the article is herein incorporated by reference and discussed briefly below:

[0504] Canver et al. involves novel pooled guide RNA libraries to perform in situ saturating mutagenesis of the human and mouse BCL11A erythroid enhancers previously identified as an enhancer associated with fetal hemoglobin (HbF) level and whose mouse ortholog is necessary for erythroid BCL11A expression. This approach revealed critical minimal features and discrete vulnerabilities of these enhancers. Through editing of primary human progenitors and mouse transgenesis, the authors validated the BCL11A erythroid enhancer as a target for HbF reinduction. The authors generated a detailed enhancer map that informs therapeutic genome editing.

### Modification of a Cell or Organism

[0505] The present disclosure further provides cells comprising one or more components of the systems herein, e.g., the IsrB polypeptide nuclease and/or ωRNA(s). Also provided include cells modified by the systems and methods herein, and cell cultures, tissues, organs, organism comprising such cells or progeny thereof. The invention In one embodiment comprehends a method of modifying a cell or organism. The cell may be a prokaryotic cell or a eukaryotic cell. The cell may be a mammalian cell. The mammalian cell many be a non-human primate, bovine, porcine, rodent or mouse cell. The cell may be a non-mammalian eukaryotic cell such as poultry, fish or shrimp. The cell may also be a plant cell. The plant cell may be of a crop plant such as cassava, corn, sorghum, wheat, or rice. The plant cell may also be of an algae, tree or vegetable. The modification introduced to the cell by the present invention may be such that the cell and progeny of the cell are altered for improved production of biologic products such as an antibody, starch, alcohol or other desired cellular output. The modification introduced to the cell by the present invention may be such that the cell and progeny of the cell include an alteration that changes the biologic product produced.

### Therapeutic Uses and Methods of Treatment

[0506] Also provided herein are methods of diagnosing, prognosing, treating, and/or preventing a disease, state, or condition in or of a subject. Generally, the methods of diagnosing, prognosing, treating, and/or preventing a disease, state, or condition in or of a subject can include modifying a polynucleotide in a subject or cell thereof using a composition, system, or component thereof described herein and/or include detecting a diseased or healthy polynucleotide in a subject or cell thereof using a composition, system, or component thereof described herein. In one embodiment, the method of treatment or prevention can include using a composition, system, or component thereof to modify a polynucleotide of an infectious organism (e.g. bacterial or virus) within a subject or cell thereof. In one embodiment, the method of treatment or prevention can include using a composition, system, or component thereof to modify a polynucleotide of an infectious organism or symbiotic organism within a subject. The composition, system, and components thereof can be used to develop models of diseases, states, or conditions. The composition, system, and components thereof can be used to detect a disease state or correction thereof, such as by a method of treatment or prevention described herein. The composition, system, and components thereof can be used to screen and select cells that can be used, for example, as treatments or preventions described herein. The composition, system, and components thereof can be used to develop biologically active agents that can be used to modify one or more biologic functions or activities in a subject or a cell thereof.

[0507] In general, the method can include delivering a composition, system, and/or component thereof to a subject or cell thereof, or to an infectious or symbiotic organism by a suitable delivery technique and/or composition. Once administered the components can operate as described elsewhere herein to elicit a nucleic acid modification event. In some aspects, the nucleic acid modification event can occur at the genomic, epigenomic, and/or transcriptomic level. DNA and/or RNA cleavage, gene activation, and/or gene deactivation can occur. Additional features, uses, and advantages are described in greater detail below. On the basis of this concept, several variations are appropriate to elicit a genomic locus event, including DNA cleavage, gene activation, or gene deactivation. Using the provided compositions, the person skilled in the art can advantageously and specifically target single or multiple loci with the same or different functional domains to elicit one or more genomic locus events. In addition to treating and/or preventing a disease in a subject, the compositions may be applied in a wide variety of methods for screening in libraries in cells and functional modeling in vivo (e.g. gene activation of lincRNA and identification of function; gain-of-function modeling; loss-of-function modeling; the use the compositions of the invention to establish cell lines and transgenic animals for optimization and screening purposes).

[0508] The composition, system, and components thereof described elsewhere herein can be used to treat and/or prevent a disease, such as a genetic and/or epigenetic disease, in a subject. The composition, system, and components thereof described elsewhere herein can be used to treat and/or prevent genetic infectious diseases in a subject, such as bacterial infections, viral infections, fungal infections, parasite infections, and combinations thereof. The composition, system, and components thereof described elsewhere herein can be used to modify the composition or profile of a microbiome in a subject, which can in turn modify the health status of the subject. The composition, system, described herein can be used to modify cells ex vivo, which can then be administered to the subject whereby the modified cells can treat or prevent a disease or symptom thereof. This is also referred to in some contexts as adoptive therapy. The composition, system, described herein can be used to treat mitochondrial diseases, where the mitochondrial disease etiology involves a mutation in the mitochondrial DNA.

[0509] Also provided is a method of treating a subject, e.g., a subject in need thereof, comprising inducing gene editing by transforming the subject with the polynucleotide encoding one or more components of the composition, system, or complex or any of polynucleotides or vectors described herein and administering them to the subject. A suitable repair template may also be provided, for example delivered by a vector comprising said repair template. The repair template may be a recombination template herein. Also provided is a method of treating a subject, e.g., a subject in need thereof, comprising inducing transcriptional activation or repression of multiple target gene loci by transforming the subject with the polynucleotides or vectors described herein, wherein said polynucleotide or vector encodes or comprises one or more components of composition, system, complex or component thereof comprising multiple IscB polypeptide nucleases. Where any treatment is occurring ex vivo, for example in a cell culture, then it will be appreciated that the term ‘subject’ may be replaced by the phrase “cell or cell culture.”

[0510] Also provided is a method of treating a subject, e.g., a subject in need thereof, comprising inducing gene editing by transforming the subject with the IsrB polypeptide nuclease(s), advantageously encoding and expressing in vivo the remaining portions of the composition, system, (e.g., ωRNA). A suitable repair template may also be provided, for example delivered by a vector comprising said repair template. Also provided is a method of treating a subject, e.g., a subject in need thereof, comprising inducing transcriptional activation or repression by transforming the subject with the IsrB polypeptide nuclease(s) advantageously encoding and expressing in vivo the remaining portions of the composition, system, (e.g., ωRNA,); advantageously In one embodiment the IsrB polypeptide nuclease is a catalytically inactive IsrB polypeptide nuclease and includes one or more associated functional domains. Where any treatment is occurring ex vivo, for example in a cell culture, then it will be appreciated that the term ‘subject’ may be replaced by the phrase “cell or cell culture.”

[0511] One or more components of the composition and system described herein can be included in a composition, such as a pharmaceutical composition, and administered to a host individually or collectively. Alternatively, these components may be provided in a single composition for administration to a host. Administration to a host may be performed via viral vectors known to the skilled person or described herein for delivery to a host (e.g. lentiviral vector, adenoviral vector, AAV vector). As explained herein, use of different selection markers (e.g. for lentiviral hRNA selection) and concentration of ωRNA (e.g. dependent on whether multiple ωRNAs are used) may be advantageous for eliciting an improved effect.

[0512] Thus, also described herein are methods of inducing one or more polynucleotide modifications in a eukaryotic or prokaryotic cell or component thereof (e.g., a mitochondria) of a subject, infectious organism, and/or organism of the microbiome of the subject. The modification can include the introduction, deletion, or substitution of one or more nucleotides at a target sequence of a polynucleotide of one or more cell(s). The modification can occur in vitro, ex vivo, in situ, or in vivo.

[0513] In one embodiment, the method of treating or inhibiting a condition or a disease caused by one or more mutations in a genomic locus in a eukaryotic organism or a non-human organism can include manipulation of a target sequence within a coding, non-coding or regulatory element of said genomic locus in a target sequence in a subject or a non-human subject in need thereof comprising modifying the subject or a non-human subject by manipulation of the target sequence and wherein the condition or disease is susceptible to treatment or inhibition by manipulation of the target sequence including providing treatment comprising delivering a composition comprising the particle delivery system or the delivery system or the virus particle of any one of the above embodiment or the cell of any one of the above embodiment.

[0514] Also provided herein is the use of the particle delivery system or the delivery system or the virus particle of any one of the above embodiments or the cell of any one of the above embodiment in ex vivo or in vivo gene or genome editing; or for use in in vitro, ex vivo or in vivo gene therapy. Also provided herein are particle delivery systems, non-viral delivery systems, and/or the virus particle of any one of the above embodiments or the cell of any one of the above embodiments used in the manufacture of a medicament for in vitro, ex vivo or in vivo gene or genome editing or for use in in vitro, ex vivo or in vivo gene therapy or for use in a method of modifying an organism or a non-human organism by manipulation of a target sequence in a genomic locus associated with a disease or in a method of treating or inhibiting a condition or disease caused by one or more mutations in a genomic locus in a eukaryotic organism or a non-human organism.

[0515] In one embodiment, polynucleotide modification can include the introduction, deletion, or substitution of 1-75 nucleotides at each target sequence of said polynucleotide of said cell(s). The modification can include the introduction, deletion, or substitution of at least 1, 5, 10, 11, 12, 13, 14, 15, 16, 17, 18, 19, 20, 21, 22, 23, 24, 25, 26, 27, 28, 29, 30, 35, 40, 45, 50, or 75 nucleotides at each target sequence. The modification can include the introduction, deletion, or substitution of at least 5, 10, 11, 12, 13, 14, 15, 16, 17, 18, 19, 20, 21, 22, 23, 24, 25, 26, 27, 28, 29, 30, 35, 40, 45, 50, or 75 nucleotides at each target sequence of said cell(s). The modification can include the introduction, deletion, or substitution of at least 10, 11, 12, 13, 14, 15, 16, 17, 18, 19, 20, 21, 22, 23, 24, 25, 26, 27, 28, 29, 30, 35, 40, 45, 50, or 75 nucleotides at each target sequence of said cell(s). The modification can include the introduction, deletion, or substitution of at least 20, 21, 22, 23, 24, 25, 26, 27, 28, 29, 30, 35, 40, 45, 50, or 75 nucleotides at each target sequence of said cell(s). The modification can include the introduction, deletion, or substitution of at least 40, 45, 50, 75, 100, 200, 300, 400 or 500 nucleotides at each target sequence of said cell(s). The modification can include the introduction, deletion, or substitution of at least 500, 600, 700, 800, 900, 1000, 1100, 1200, 1300, 1400, 1500, 1600, 1700, 1800, 1900, 2000, 2100, 2200, 2300, 2400, 2500, 2600, 2700, 2800, 2900, 3000, 3100, 3200, 3300, 3400, 3500, 3600, 3700, 3800, 3900, 4000, 4100, 4200, 4300, 4400, 4500, 4600, 4700, 4800, 4900, 5000, 5100, 5200, 5300, 5400, 5500, 5600, 5700, 5800, 5900, 6000, 6100, 6200, 6300, 6400, 6500, 6600, 6700, 6800, 6900, 7000, 7100, 7200, 7300, 7400, 7500, 7600, 7700, 7800, 7900, 8000, 8100, 8200, 8300, 8400, 8500, 8600, 8700, 8800, 8900, 9000, 9100, 9200, 9300, 9400, 9500, 9600, 9700, 9800, or 9900 to 10000 nucleotides at each target sequence of said cell(s).

[0516] In one embodiment, the modifications can include the introduction, deletion, or substitution of nucleotides at each target sequence of said cell(s) via nucleic acid components (e.g., ωRNA(s)), such as those mediated by a composition, system, or a component thereof described elsewhere herein. In one embodiment, the modifications can include the introduction, deletion, or substitution of nucleotides at a target or random sequence of said cell(s) via a composition, system, or technique.

[0517] In one embodiment, the composition, system, or component thereof can promote Non-Homologous End-Joining (NHEJ). In one embodiment, modification of a polynucleotide by a composition, system, or a component thereof, such as a diseased polynucleotide, can include NHEJ. In one embodiment, promotion of this repair pathway by the composition, system, or a component thereof can be used to target gene or polynucleotide specific knock-outs and/or knock-ins. In one embodiment, promotion of this repair pathway by the composition, system, or a component thereof can be used to generate NHEJ-mediated indels. Nuclease-induced NHEJ can also be used to remove (e.g., delete) sequence in a gene of interest. Generally, NHEJ repairs a double-strand break in the DNA by joining together the two ends; however, generally, the original sequence is restored only if two compatible ends, exactly as they were formed by the double-strand break, are perfectly ligated. The DNA ends of the single-strand break are frequently the subject of enzymatic processing, resulting in the addition or removal of nucleotides, at one or both strands, prior to rejoining of the ends. This results in the presence of insertion and/or deletion (indel) mutations in the DNA sequence at the site of the NHEJ repair. The indel can range in size from 1-50 or more base pairs. In one embodiment thee indel can be 1, 2, 3, 4, 5, 6, 7, 8, 9, 10, 11, 12, 13, 14, 15, 16, 17, 18, 19, 20, 21, 22, 23, 24, 25, 26, 27, 28, 29, 30, 31, 32, 33, 34, 35, 36, 37, 38, 39, 40, 41, 42, 43, 44, 45, 46, 47, 48, 49, 50, 51, 52, 53, 54, 55, 56, 57, 58, 59, 60, 61, 62, 63, 64, 65, 66, 67, 68, 69, 70, 71, 72, 73, 74, 75, 76, 77, 78, 79, 80, 81, 82, 83, 84, 85, 86, 87, 88, 89, 90, 91, 92, 93, 94, 95, 96, 97, 98, 99, 100, 101, 102, 103, 104, 105, 106, 107, 108, 109, 110, 111, 112, 113, 114, 115, 116, 117, 118, 119, 120, 121, 122, 123, 124, 125, 126, 127, 128, 129, 130, 131, 132, 133, 134, 135, 136, 137, 138, 139, 140, 141, 142, 143, 144, 145, 146, 147, 148, 149, 150, 151, 152, 153, 154, 155, 156, 157, 158, 159, 160, 161, 162, 163, 164, 165, 166, 167, 168, 169, 170, 171, 172, 173, 174, 175, 176, 177, 178, 179, 180, 181, 182, 183, 184, 185, 186, 187, 188, 189, 190, 191, 192, 193, 194, 195, 196, 197, 198, 199, 200, 201, 202, 203, 204, 205, 206, 207, 208, 209, 210, 211, 212, 213, 214, 215, 216, 217, 218, 219, 220, 221, 222, 223, 224, 225, 226, 227, 228, 229, 230, 231, 232, 233, 234, 235, 236, 237, 238, 239, 240, 241, 242, 243, 244, 245, 246, 247, 248, 249, 250, 251, 252, 253, 254, 255, 256, 257, 258, 259, 260, 261, 262, 263, 264, 265, 266, 267, 268, 269, 270, 271, 272, 273, 274, 275, 276, 277, 278, 279, 280, 281, 282, 283, 284, 285, 286, 287, 288, 289, 290, 291, 292, 293, 294, 295, 296, 297, 298, 299, 300, 301, 302, 303, 304, 305, 306, 307, 308, 309, 310, 311, 312, 313, 314, 315, 316, 317, 318, 319, 320, 321, 322, 323, 324, 325, 326, 327, 328, 329, 330, 331, 332, 333, 334, 335, 336, 337, 338, 339, 340, 341, 342, 343, 344, 345, 346, 347, 348, 349, 350, 351, 352, 353, 354, 355, 356, 357, 358, 359, 360, 361, 362, 363, 364, 365, 366, 367, 368, 369, 370, 371, 372, 373, 374, 375, 376, 377, 378, 379, 380, 381, 382, 383, 384, 385, 386, 387, 388, 389, 390, 391, 392, 393, 394, 395, 396, 397, 398, 399, 400, 401, 402, 403, 404, 405, 406, 407, 408, 409, 410, 411, 412, 413, 414, 415, 416, 417, 418, 419, 420, 421, 422, 423, 424, 425, 426, 427, 428, 429, 430, 431, 432, 433, 434, 435, 436, 437, 438, 439, 440, 441, 442, 443, 444, 445, 446, 447, 448, 449, 450, 451, 452, 453, 454, 455, 456, 457, 458, 459, 460, 461, 462, 463, 464, 465, 466, 467, 468, 469, 470, 471, 472, 473, 474, 475, 476, 477, 478, 479, 480, 481, 482, 483, 484, 485, 486, 487, 488, 489, 490, 491, 492, 493, 494, 495, 496, 497, 498, 499, or 500 base pairs or more. If a double-strand break is targeted near to a short target sequence, the deletion mutations caused by the NHEJ repair often span, and therefore remove, the unwanted nucleotides. For the deletion of larger DNA segments, introducing two single-strand breaks, one on each side of the sequence, can result in NHEJ between the ends with removal of the entire intervening sequence. Both of these approaches can be used to delete specific DNA sequences.

[0518] In one embodiment, composition, system, mediated NHEJ can be used in the method to delete small sequence motifs. In one embodiment, composition, system, mediated NHEJ can be used in the method to generate NHEJ-mediate indels that can be targeted to the gene, e.g., a coding region, e.g., an early coding region of a gene of interest can be used to knockout (i.e., eliminate expression of) a gene of interest. For example, early coding region of a gene of interest includes sequence immediately following a transcription start site, within a first exon of the coding sequence, or within 500 bp of the transcription start site (e.g., less than 500, 450, 400, 350, 300, 250, 200, 150, 100 or 50 bp). In an embodiment, in which a ωRNA and IsrB polypeptide nuclease generates a single-strand break for the purpose of inducing NHEJ-mediated indels, a ωRNA may be configured to position one single-strand break in close proximity to a nucleotide of the target position. In an embodiment, the cleavage site may be between 0-500 bp away from the target position (e.g., less than 500, 400, 300, 200, 100, 50, 40, 30, 25, 20, 15, 10, 9, 8, 7, 6, 5, 4, 3, 2 or 1 bp from the target position). In an embodiment, in which two ωRNA complexing with one or more nickases induce two single strand breaks for the purpose of inducing NHEJ-mediated indels, two @ RNAs may be configured to position two single-strand breaks to provide for NHEJ repair a nucleotide of the target position.

[0519] For minimization of toxicity and off-target effect, it may be important to control the concentration of IsrB polypeptide nuclease mRNA and ωRNA delivered. Optimal concentrations of IsrB polypeptide nuclease mRNA and ωRNA can be determined by testing different concentrations in a cellular or non-human eukaryote animal model and using deep sequencing the analyze the extent of modification at potential off-target genomic loci. Alternatively, to minimize the level of toxicity and off-target effect, nickase mRNA (for example S. pyogenes Cas9 with the D10A mutation) can be delivered with a pair of guide RNAs targeting a site of interest. Guide sequences and strategies to minimize toxicity and off-target effects can be as in International Patent Publication No. WO 2014/093622 (PCT/US2013/074667); or, via mutation. Others are as described elsewhere herein.

[0520] Typically, in the context of an endogenous IsrB polypeptide nuclease, formation of a IsrB polypeptide nuclease or complex (comprising a ωRNA sequence hybridized to a target sequence and complexed with one or more IsrB polypeptide nucleases) results in cleavage, nicking, and/or another modification of one or both strands in or near (e.g. within 1, 2, 3, 4, 5, 6, 7, 8, 9, 10, 20, 50, or more base pairs from) the target sequence.

[0521] In one embodiment, a method of modifying a target polynucleotide in a cell to treat or prevent a disease can include allowing a composition, system, or component thereof to bind to the target polynucleotide, e.g., to effect cleavage, nicking, or other modification as the composition, system, is capable of said target polynucleotide, thereby modifying the target polynucleotide, wherein the composition, system, or component thereof, complex with a guide sequence, and hybridize said guide sequence to a target sequence within the target polynucleotide, wherein said guide sequence is optionally linked to a @ RNA scaffold sequence. In some of these embodiments, the composition, system, or component thereof can be or include a IsrB polypeptide nuclease complexed with a guide sequence. In one embodiment, modification can include cleaving or nicking one or two strands at the location of the target sequence by one or more components of the composition, system, or component thereof.

[0522] The cleavage, nicking, or other modification capable of being performed by the composition, system, can modify transcription of a target polynucleotide. In one embodiment, modification of transcription can include decreasing transcription of a target polynucleotide. In one embodiment, modification can include increasing transcription of a target polynucleotide. In one embodiment, the method includes repairing said cleaved target polynucleotide by homologous recombination with a recombination template polynucleotide, wherein said repair results in a modification such as, but not limited to, an insertion, deletion, or substitution of one or more nucleotides of said target polynucleotide. In one embodiment, said modification results in one or more amino acid changes in a protein expressed from a gene comprising the target sequence. In one embodiment, the modification imparted by the composition, system, or component thereof provides a transcript and/or protein that can correct a disease or a symptom thereof, including but not limited to, any of those described in greater detail elsewhere herein.

[0523] In one embodiment, the method of treating or preventing a disease can include delivering one or more vectors or vector systems to a cell, such as a eukaryotic or prokaryotic cell, wherein one or more vectors or vector systems include the composition, system, or component thereof. In one embodiment, the vector(s) or vector system(s) can be a viral vector or vector system, such as an AAV or lentiviral vector system, which are described in greater detail elsewhere herein. In one embodiment, the method of treating or preventing a disease can include delivering one or more viral particles, such as an AAV or lentiviral particle, containing the composition, system, or component thereof. In one embodiment, the viral particle has a tissue specific tropism. In one embodiment, the viral particle has a liver, muscle, eye, heart, pancreas, kidney, neuron, epithelial cell, endothelial cell, astrocyte, glial cell, immune cell, or red blood cell specific tropism.

[0524] It will be understood that the composition and system, according to the invention as described herein, such as the composition and system, for use in the methods according to the invention as described herein, may be suitably used for any type of application known for composition, system, preferably in eukaryotes. In certain aspects, the application is therapeutic, preferably therapeutic in a eukaryote organism, such as including but not limited to animals (including human), plants, algae, fungi (including yeasts), etc. Alternatively, or in addition, in certain aspects, the application may involve accomplishing or inducing one or more particular traits or characteristics, such as genotypic and/or phenotypic traits or characteristics, as also described elsewhere herein.

### Treating Diseases of the Circulatory System

[0525] In one embodiment, the composition, system, and/or component thereof described herein can be used to treat and/or prevent a circulatory system disease. Exemplary disease is provided, for example, in Table 6. In one embodiment the plasma exosomes of Wahlgren et al. (Nucleic Acids Research, 2012, Vol. 40, No. 17 e130) can be used to deliver the composition, system, and/or component thereof described herein to the blood. In one embodiment, the circulatory system disease can be treated by using a lentivirus to deliver the composition, system, described herein to modify hematopoietic stem cells (HSCs) in vivo or ex vivo (see e.g. Drakopoulou, “Review Article, The Ongoing Challenge of Hematopoietic Stem Cell-Based Gene Therapy for β-Thalassemia,” Stem Cells International, Volume 2011, Article ID 987980, 10 pages, doi: 10.4061/2011/987980, which can be adapted for use with the composition, system, herein in view of the description herein). In one embodiment, the circulatory system disorder can be treated by correcting HSCs as to the disease using a composition, system, herein or a component thereof, wherein the composition, system, optionally includes a suitable HDR repair template (see e.g. Cavazzana, “Outcomes of Gene Therapy for β-Thalassemia Major via Transplantation of Autologous Hematopoietic Stem Cells Transduced Ex Vivo with a Lentiviral βA-T87Q-Globin Vector.”; Cavazzana-Calvo, “Transfusion independence and HMGA2 activation after gene therapy of human β-thalassaemia”, Nature 467, 318-322 (16 Sep. 2010) doi: 10.1038/nature09328; Nienhuis, “Development of Gene Therapy for Thalassemia, Cold Spring Harbor Perspectives in Medicine, doi: 10.1101/cshperspect.a011833 (2012), LentiGlobin BB305, a lentiviral vector containing an engineered β-globin gene (BA-T87Q); and Xie et al., “Seamless gene correction of β-thalassaemia mutations in patient-specific iPSCs using CRISPR/Cas9 and piggyback” Genome Research gr. 173427.114 (2014) www.genome.org/cgi/doi/10.1101/gr.173427.114 (Cold Spring Harbor Laboratory Press; [1599] Watts, “Hematopoietic Stem Cell Expansion and Gene Therapy” Cytotherapy 13 (10): 1164-1171. doi: 10.3109/14653249.2011.620748 (2011), which can be adapted for use with the composition, system, herein in view of the description herein). In one embodiment, iPSCs can be modified using a composition, system, described herein to correct a disease polynucleotide associated with a circulatory disease. In this regard, the teachings of Xu et al. (Sci Rep. 2015 Jul. 9; 5:12065. doi: 10.1038/srep12065) and Song et al. (Stem Cells Dev. 2015 May 1; 24 (9): 1053-65. doi: 10.1089/scd.2014.0347. Epub 2015 Feb. 5) with respect to modifying iPSCs can be adapted for use in view of the description herein with the composition, system, described herein.

[0526] The term “Hematopoietic Stem Cell” or “HSC” refers broadly those cells considered to be an HSC, e.g., blood cells that give rise to all the other blood cells and are derived from mesoderm; located in the red bone marrow, which is contained in the core of most bones. HSCs of the invention include cells having a phenotype of hematopoietic stem cells, identified by small size, lack of lineage (lin) markers, and markers that belong to the cluster of differentiation series, like: CD34, CD38, CD90, CD133, CD105, CD45, and also c-kit,-the receptor for stem cell factor. Hematopoietic stem cells are negative for the markers that are used for detection of lineage commitment, and are, thus, called Lin−; and, during their purification by FACS, a number of up to 14 different mature blood-lineage markers, e.g., CD13 & CD33 for myeloid, CD71 for erythroid, CD19 for B cells, CD61 for megakaryocytic, etc. for humans; and, B220 (murine CD45) for B cells, Mac-1 (CD11b/CD18) for monocytes, Gr-1 for Granulocytes, Ter119 for erythroid cells, I17Ra, CD3, CD4, CD5, CD8 for T cells, etc. Mouse HSC markers: CD34lo/−, SCA-1+, Thy1.1+/lo, CD38+, C-kit+, lin−, and Human HSC markers: CD34+, CD59+, Thy1/CD90+, CD38lo/−, C-kit/CD117+, and lin−. HSCs are identified by markers. Hence in embodiments discussed herein, the HSCs can be CD34+ cells. HSCs can also be hematopoietic stem cells that are CD34−/CD38−. Stem cells that may lack c-kit on the cell surface that are considered in the art as HSCs are within the ambit of the invention, as well as CD133+ cells likewise considered HSCs in the art.

[0527] In one embodiment, the treatment or prevention for treating a circulatory system or blood disease can include modifying a human cord blood cell with any modification described herein. In one embodiment, the treatment or prevention for treating a circulatory system or blood disease can include modifying a granulocyte colony-stimulating factor-mobilized peripheral blood cell (mPB) with any modification described herein. In one embodiment, the human cord blood cell or mPB can be CD34+. In one embodiment, the cord blood cell(s) or mPB cell(s) modified can be autologous. In one embodiment, the cord blood cell(s) or mPB cell(s) can be allogenic. In addition to the modification of the disease gene(s), allogenic cells can be further modified using the composition, system, described herein to reduce the immunogenicity of the cells when delivered to the recipient. Such techniques are described elsewhere herein and e.g. Cartier, “MINI-SYMPOSIUM: X-Linked Adrenoleukodystrophypa, Hematopoietic Stem Cell Transplantation and Hematopoietic Stem Cell Gene Therapy in X-Linked Adrenoleukodystrophy,” Brain Pathology 20 (2010) 857-862, which can be adapted for use with the composition, system, herein. The modified cord blood cell(s) or mPB cell(s) can be optionally expanded in vitro. The modified cord blood cell(s) or mPB cell(s) can be derived to a subject in need thereof using any suitable delivery technique.

[0528] The compositions may be engineered to target genetic locus or loci in HSCs. In one embodiment, the IsrB polypeptide nuclease(s) can be codon-optimized for a eukaryotic cell and especially a mammalian cell, e.g., a human cell, for instance, HSC, or iPSC and hRNA targeting a locus or loci in HSC, such as circulatory disease, can be prepared. These may be delivered via particles. The particles may be formed by the IsrB polypeptide nuclease and the ωRNA being admixed. The @ RNA and IsrB polypeptide nuclease mixture can be, for example, admixed with a mixture comprising or consisting essentially of or consisting of surfactant, phospholipid, biodegradable polymer, lipoprotein and alcohol, whereby particles containing the ωRNA and IsrB polypeptide nuclease may be formed. The invention comprehends so making particles and particles from such a method as well as uses thereof. Particles suitable delivery of the composition in the context of blood or circulatory system or HSC delivery to the blood or circulatory system are described in greater detail elsewhere herein.

[0529] In one embodiment, after ex vivo modification the HSCs or iPCS can be expanded prior to administration to the subject. Expansion of HSCs can be via any suitable method such as that described by, Lee, “Improved ex vivo expansion of adult hematopoietic stem cells by overcoming CUL4-mediated degradation of HOXB4.” Blood. 2013 May 16; 121 (20): 4082-9. doi: 10.1182/blood-2012-09-455204. Epub 2013 Mar. 21.

[0530] In one embodiment, the HSCs or iPSCs modified can be autologous. In one embodiment, the HSCs or iPSCs can be allogenic. In addition to the modification of the disease gene(s), allogenic cells can be further modified using the composition, system, described herein to reduce the immunogenicity of the cells when delivered to the recipient. Such techniques are described elsewhere herein and e.g. Cartier, “MINI-SYMPOSIUM: X-Linked Adrenoleukodystrophypa, Hematopoietic Stem Cell Transplantation and Hematopoietic Stem Cell Gene Therapy in X-Linked Adrenoleukodystrophy,” Brain Pathology 20 (2010) 857-862, which can be adapted for use with the composition, system, herein.

### Treating Neurological Diseases

[0531] In one embodiment, the compositions, systems, described herein can be used to treat diseases of the brain and CNS. Delivery options for the brain include encapsulation of IsrB polypeptide nuclease and ωRNA in the form of either DNA or RNA into liposomes and conjugating to molecular Trojan horses for trans-blood brain barrier (BBB) delivery. Molecular Trojan horses have been shown to be effective for delivery of B-gal expression vectors into the brain of non-human primates. The same approach can be used to delivery vectors containing IsrB polypeptide nuclease and ωRNA. For instance, Xia C F and Boado R J, Pardridge W M (“Antibody-mediated targeting of siRNA via the human insulin receptor using avidin-biotin technology.” Mol Pharm. 2009 May-Jun; 6 (3): 747-51. doi: 10.1021/mp800194) describes how delivery of short interfering RNA (siRNA) to cells in culture, and in vivo, is possible with combined use of a receptor-specific monoclonal antibody (mAb) and avidin-biotin technology. The authors also report that because the bond between the targeting mAb and the siRNA is stable with avidin-biotin technology, and RNAi effects at distant sites such as brain are observed in vivo following an intravenous administration of the targeted siRNA, the teachings of which can be adapted for use with the compositions, systems, herein. In other embodiments, an artificial virus can be generated for CNS and/or brain delivery. See e.g. Zhang et al. (Mol Ther. 2003 January; 7 (1): 11-8.)), the teachings of which can be adapted for use with the compositions, systems, herein.

### Treating Hearing Diseases

[0532] In one embodiment the composition and system described herein can be used to treat a hearing disease or hearing loss in one or both ears. Deafness is often caused by lost or damaged hair cells that cannot relay signals to auditory neurons. In such cases, cochlear implants may be used to respond to sound and transmit electrical signals to the nerve cells. But these neurons often degenerate and retract from the cochlea as fewer growth factors are released by impaired hair cells.

[0533] In one embodiment, the composition, system, or modified cells can be delivered to one or both ears for treating or preventing hearing disease or loss by any suitable method or technique. Suitable methods and techniques include, but are not limited to, those set forth in US Patent Publication No. 20120328580 describes injection of a pharmaceutical composition into the ear (e.g., auricular administration), such as into the luminae of the cochlea (e.g., the Scala media, Sc vestibulae, and Sc tympani), e.g., using a syringe, e.g., a single-dose syringe. For example, one or more of the compounds described herein can be administered by intratympanic injection (e.g., into the middle ear), and/or injections into the outer, middle, and/or inner ear; administration in situ, via a catheter or pump (see e.g. Mckenna et al., (U.S. Patent Publication No. 2006/0030837) and Jacobsen et al., (U.S. Pat. No. 7,206,639); administration in combination with a mechanical device such as a cochlear implant or a hearing aid, which is worn in the outer ear (see e.g. U.S. Patent Publication No. 2007/0093878, which provides an exemplary cochlear implant suitable for delivery of the compositions, systems, described herein to the ear). Such methods are routinely used in the art, for example, for the administration of steroids and antibiotics into human ears. Injection can be, for example, through the round window of the ear or through the cochlear capsule. Other inner ear administration methods are known in the art (see, e.g., Salt and Plontke, Drug Discovery Today, 10:1299-1306, 2005). In one embodiment, a catheter or pump can be positioned, e.g., in the ear (e.g., the outer, middle, and/or inner ear) of a patient during a surgical procedure. In one embodiment, a catheter or pump can be positioned, e.g., in the ear (e.g., the outer, middle, and/or inner ear) of a patient without the need for a surgical procedure.

[0534] In general, the cell therapy methods described in US Patent Publication No. 20120328580 can be used to promote complete or partial differentiation of a cell to or towards a mature cell type of the inner ear (e.g., a hair cell) in vitro. Cells resulting from such methods can then be transplanted or implanted into a patient in need of such treatment. The cell culture methods required to practice these methods, including methods for identifying and selecting suitable cell types, methods for promoting complete or partial differentiation of selected cells, methods for identifying complete or partially differentiated cell types, and methods for implanting complete or partially differentiated cells are described below.

[0535] Cells suitable for use in the present invention include, but are not limited to, cells that are capable of differentiating completely or partially into a mature cell of the inner ear, e.g., a hair cell (e.g., an inner and/or outer hair cell), when contacted, e.g., in vitro, with one or more of the compounds described herein. Exemplary cells that are capable of differentiating into a hair cell include, but are not limited to stem cells (e.g., inner ear stem cells, adult stem cells, bone marrow derived stem cells, embryonic stem cells, mesenchymal stem cells, skin stem cells, iPS cells, and fat derived stem cells), progenitor cells (e.g., inner ear progenitor cells), support cells (e.g., Deiters' cells, pillar cells, inner phalangeal cells, tectal cells and Hensen's cells), and/or germ cells. The use of stem cells for the replacement of inner ear sensory cells is described in Li et al., (U.S. Patent Publication No. 2005/0287127) and Li et al., (U.S. patent application Ser. No. 11/953,797). The use of bone marrow derived stem cells for the replacement of inner ear sensory cells is described in Edge et al., PCT/US2007/084654. iPS cells are described, e.g., at Takahashi et al., Cell, Volume 131, Issue 5, Pages 861-872 (2007); Takahashi and Yamanaka, Cell 126, 663-76 (2006); Okita et al., Nature 448, 260-262 (2007); Yu, J. et al., Science 318 (5858): 1917-1920 (2007); Nakagawa et al., Nat. Biotechnol. 26:101-106 (2008); and Zaehres and Scholer, Cell 131 (5): 834-835 (2007). Such suitable cells can be identified by analyzing (e.g., qualitatively or quantitatively) the presence of one or more tissue specific genes. For example, gene expression can be detected by detecting the protein product of one or more tissue-specific genes. Protein detection techniques involve staining proteins (e.g., using cell extracts or whole cells) using antibodies against the appropriate antigen. In this case, the appropriate antigen is the protein product of the tissue-specific gene expression. Although, in principle, a first antibody (i.e., the antibody that binds the antigen) can be labeled, it is more common (and improves the visualization) to use a second antibody directed against the first (e.g., an anti-IgG). This second antibody is conjugated either with fluorochromes, or appropriate enzymes for colorimetric reactions, or gold beads (for electron microscopy), or with the biotin-avidin system, so that the location of the primary antibody, and thus the antigen, can be recognized.

[0536] The composition and system may be delivered to the ear by direct application of pharmaceutical composition to the outer ear, with compositions modified from US Patent Publication No. 20110142917. In one embodiment the pharmaceutical composition is applied to the ear canal. Delivery to the ear may also be referred to as aural or otic delivery.

[0537] In one embodiment, the compositions, systems, or components thereof and/or vectors or vector systems can be delivered to ear via a transfection to the inner ear through the intact round window by a novel proteidic delivery technology which may be applied to the nucleic acid-targeting system of the present invention (see, e.g., Qi et al., Gene Therapy (2013), 1-9). About 40 μl of 10 mM RNA may be contemplated as the dosage for administration to the ear.

[0538] According to Rejali et al. (Hear Res. 2007 June; 228 (1-2): 180-7), cochlear implant function can be improved by good preservation of the spiral ganglion neurons, which are the target of electrical stimulation by the implant and brain derived neurotrophic factor (BDNF) has previously been shown to enhance spiral ganglion survival in experimentally deafened ears. Rejali et al. tested a modified design of the cochlear implant electrode that includes a coating of fibroblast cells transduced by a viral vector with a BDNF gene insert. To accomplish this type of ex vivo gene transfer, Rejali et al. transduced guinea pig fibroblasts with an adenovirus with a BDNF gene cassette insert, and determined that these cells secreted BDNF and then attached BDNF-secreting cells to the cochlear implant electrode via an agarose gel, and implanted the electrode in the scala tympani. Rejali et al. determined that the BDNF expressing electrodes were able to preserve significantly more spiral ganglion neurons in the basal turns of the cochlea after 48 days of implantation when compared to control electrodes and demonstrated the feasibility of combining cochlear implant therapy with ex vivo gene transfer for enhancing spiral ganglion neuron survival. Such a system may be applied to the nucleic acid-targeting system of the present invention for delivery to the ear.

[0539] In one embodiment, the system set forth in Mukherjea et al. (Antioxidants & Redox Signaling, Volume 13, Number 5, 2010) can be adapted for transtympanic administration of the composition, system, or component thereof to the ear. In one embodiment, a dosage of about 2 mg to about 4 mg of IscB polypeptide or CRISPR-associated IscB polypeptide nuclease for administration to a human.

[0540] In one embodiment, the system set forth in [Jung et al. (Molecular Therapy, vol. 21 no. 4, 834-841 Apr. 2013) can be adapted for vestibular epithelial delivery of the composition, system, or component thereof to the ear. In one embodiment, a dosage of about 1 to about 30 mg of IscB polypeptide nuclease for administration to a human.

### Treating Diseases in Non-Dividing Cells

[0541] In one embodiment, the gene or transcript to be corrected is in a non-dividing cell. Exemplary non-dividing cells are muscle cells or neurons. Non-dividing (especially non-dividing, fully differentiated) cell types present issues for gene targeting or genome engineering, for example because homologous recombination (HR) is generally suppressed in the G1 cell-cycle phase. However, while studying the mechanisms by which cells control normal DNA repair systems, Durocher discovered a previously unknown switch that keeps HR “off” in non-dividing cells and devised a strategy to toggle this switch back on. Orthwein et al. (Daniel Durocher's lab at the Mount Sinai Hospital in Ottawa, Canada) recently reported (Nature 16142, published online 9 Dec. 2015) have shown that the suppression of HR can be lifted and gene targeting successfully concluded in both kidney (293T) and osteosarcoma (U2OS) cells. Tumor suppressors, BRCA1, PALB2 and BRAC2 are known to promote DNA DSB repair by HR. They found that formation of a complex of BRCA1 with PALB2-BRAC2 is governed by a ubiquitin site on PALB2, such that action on the site by an E3 ubiquitin ligase. This E3 ubiquitin ligase is composed of KEAP1 (a PALB2-interacting protein) in complex with cullin-3 (CUL3)-RBX1. PALB2 ubiquitylation suppresses its interaction with BRCA1 and is counteracted by the deubiquitylase USP11, which is itself under cell cycle control. Restoration of the BRCA1-PALB2 interaction combined with the activation of DNA-end resection is sufficient to induce homologous recombination in G1, as measured by a number of methods including a IscB polypeptide nuclease-based gene-targeting assay directed at USP11 or KEAP1 (expressed from a pX459 vector). However, when the BRCA1-PALB2 interaction was restored in resection-competent G1 cells using either KEAP1 depletion or expression of the PALB2-KR mutant, a robust increase in gene-targeting events was detected. These teachings can be adapted for and/or applied to the compositions, systems, described herein.

[0542] Thus, reactivation of HR in cells, especially non-dividing, fully differentiated cell types is preferred, In one embodiment. In one embodiment, promotion of the BRCA1-PALB2 interaction is preferred. In one embodiment, the target ell is a non-dividing cell. In one embodiment, the target cell is a neuron or muscle cell. In one embodiment, the target cell is targeted in vivo. In one embodiment, the cell is in G1 and HR is suppressed. In one embodiment, use of KEAP1 depletion, for example inhibition of expression of KEAP1 activity, is preferred. KEAP1 depletion may be achieved through siRNA, for example as shown in Orthwein et al. Alternatively, expression of the PALB2-KR mutant (lacking all eight Lys residues in the BRCA1-interaction domain is preferred, either in combination with KEAP1 depletion or alone. PALB2-KR interacts with BRCA1 irrespective of cell cycle position. Thus, promotion or restoration of the BRCA1-PALB2 interaction, especially in G1 cells, is preferred In one embodiment, especially where the target cells are non-dividing, or where removal and return (ex vivo gene targeting) is problematic, for example neuron or muscle cells. KEAP1 siRNA is available from ThermoFischer. In one embodiment, a BRCA1-PALB2 complex may be delivered to the G1 cell. In one embodiment, PALB2 deubiquitylation may be promoted for example by increased expression of the deubiquitylase USP11, so it is envisaged that a construct may be provided to promote or up-regulate expression or activity of the deubiquitylase USP11.

### Treating Diseases of the Eye

[0543] In one embodiment, the disease to be treated is a disease that affects the eyes. Thus, in one embodiment, the composition, system, or component thereof described herein is delivered to one or both eyes.

[0544] The composition, system, can be used to correct ocular defects that arise from several genetic mutations further described in Genetic Diseases of the Eye, Second Edition, edited by Elias I. Traboulsi, Oxford University Press, 2012.

[0545] In one embodiment, the condition to be treated or targeted is an eye disorder. In one embodiment, the eye disorder may include glaucoma. In one embodiment, the eye disorder includes a retinal degenerative disease. In one embodiment, the retinal degenerative disease is selected from Stargardt disease, Bardet-Biedl Syndrome, Best disease, Blue Cone Monochromacy, Choroidermia, Cone-rod dystrophy, Congenital Stationary Night Blindness, Enhanced S-Cone Syndrome, Juvenile X-Linked Retinoschisis, Leber Congenital Amaurosis, Malattia Leventinesse, Norrie Disease or X-linked Familial Exudative Vitreoretinopathy, Pattern Dystrophy, Sorsby Dystrophy, Usher Syndrome, Retinitis Pigmentosa, Achromatopsia or Macular dystrophies or degeneration, Retinitis Pigmentosa, Achromatopsia, and age related macular degeneration. In one embodiment, the retinal degenerative disease is Leber Congenital Amaurosis (LCA) or Retinitis Pigmentosa. Other exemplary eye diseases are described in greater detail elsewhere herein.

[0546] In one embodiment, the composition, system, is delivered to the eye, optionally via intravitreal injection or subretinal injection. Intraocular injections may be performed with the aid of an operating microscope. For subretinal and intravitreal injections, eyes may be prolapsed by gentle digital pressure and fundi visualized using a contact lens system consisting of a drop of a coupling medium solution on the cornea covered with a glass microscope slide coverslip. For subretinal injections, the tip of a 10-mm 34-gauge needle, mounted on a 5-μl Hamilton syringe may be advanced under direct visualization through the superior equatorial sclera tangentially towards the posterior pole until the aperture of the needle was visible in the subretinal space. Then, 2 μl of vector suspension may be injected to produce a superior bullous retinal detachment, thus confirming subretinal vector administration. This approach creates a self-sealing sclerotomy allowing the vector suspension to be retained in the subretinal space until it is absorbed by the RPE, usually within 48 h of the procedure. This procedure may be repeated in the inferior hemisphere to produce an inferior retinal detachment. This technique results in the exposure of approximately 70% of neurosensory retina and RPE to the vector suspension. For intravitreal injections, the needle tip may be advanced through the sclera 1 mm posterior to the corneoscleral limbus and 2 μl of vector suspension injected into the vitreous cavity. For intracameral injections, the needle tip may be advanced through a corneoscleral limbal paracentesis, directed towards the central cornea, and 2 μl of vector suspension may be injected. For intracameral injections, the needle tip may be advanced through a corneoscleral limbal paracentesis, directed towards the central cornea, and 2 μl of vector suspension may be injected. These vectors may be injected at titers of either 1.0-1.4×10¹⁰ or 1.0-1.4×10⁹ transducing units (TU)/ml.

[0547] In one embodiment, for administration to the eye, lentiviral vectors. In one embodiment, the lentiviral vector is an equine infectious anemia virus (EIAV) vector. Exemplary EIAV vectors for eye delivery are described in Balagaan, J Gene Med 2006; 8:275-285, Published online 21 Nov. 2005 in Wiley InterScience (www.interscience.wiley.com). DOI: 10.1002/jgm.845; Binley et al., HUMAN GENE THERAPY 23:980-991 (September 2012), which can be adapted for use with the composition, system, described herein. In one embodiment, the dosage can be 1.1×10⁵ transducing units per eye (TU/eye) in a total volume of 100 μl.

[0548] Other viral vectors can also be used for delivery to the eye, such as AAV vectors, such as those described in Campochiaro et al., Human Gene Therapy 17:167-176 (February 2006), Millington-Ward et al. (Molecular Therapy, vol. 19 no. 4, 642-649 Apr. 2011; Dalkara et al. (Sci Transl Med 5, 189ra76 (2013)), which can be adapted for use with the composition, system, described herein. In one embodiment, the dose can range from about 106 to 109.5 particle units. In the context of the Millington-Ward AAV vectors, a dose of about 2×10¹¹ to about 6×10¹³ virus particles can be administered. In the context of Dalkara vectors, a dose of about 1×10¹⁵ to about 1×10¹⁶ vg/ml administered to a human.

[0549] In one embodiment, the sd-rxRNA® system of RXi Pharmaceuticals may be used/and or adapted for delivering composition, system, to the eye. In this system, a single intravitreal administration of 3 μg of sd-rxRNA results in sequence-specific reduction of PPIB mRNA levels for 14 days. The sd-rxRNA® system may be applied to the nucleic acid-targeting system of the present invention, contemplating a dose of about 3 to 20 mg of composition administered to a human.

[0550] In other embodiments, the methods of US Patent Publication No. 20130183282, which is directed to methods of cleaving a target sequence from the human rhodopsin gene, may also be modified to the nucleic acid-targeting system of the present invention.

[0551] In other embodiments, the methods of US Patent Publication No. 20130202678 for treating retinopathies and sight-threatening ophthalmologic disorders relating to delivering of the Puf-A gene (which is expressed in retinal ganglion and pigmented cells of eye tissues and displays a unique anti-apoptotic activity) to the sub-retinal or intravitreal space in the eye may be used or adapted. In particular, desirable targets are zgc: 193933, prdmla, spata2, tex 10, rbb4, ddx3, zp2.2, Blimp-1 and HtrA2, all of which may be targeted by the composition, system, of the present invention.

[0552] Wu (Cell Stem Cell, 13:659-62, 2013) designed a guide RNA that led Cas9 to a single base pair mutation that causes cataracts in mice, where it induced DNA cleavage. Then using either the other wild-type allele or oligos given to the zygotes repair mechanisms corrected the sequence of the broken allele and corrected the cataract-causing genetic defect in mutant mouse. This approach can be adapted to and/or applied to the compositions, systems, described herein.

[0553] US Patent Publication No. 20120159653, describes use of zinc finger nucleases to genetically modify cells, animals and proteins associated with macular degeneration (MD), the teachings of which can be applied to and/or adapted for the compositions, systems, described herein.

[0554] One aspect of US Patent Publication No. 20120159653 relates to editing of any chromosomal sequences that encode proteins associated with MD which may be applied to the nucleic acid-targeting system of the present invention.

### Treating Muscle Diseases and Cardiovascular Diseases

[0555] In one embodiment, the composition, system can be used to treat and/or prevent a muscle disease and associated circulatory or cardiovascular disease or disorder. The present invention also contemplates delivering the composition, system, described herein, e.g. IsrB polypeptide systems, to the heart. For the heart, a myocardium tropic adeno-associated virus (AAVM) is preferred, in particular AAVM41 which showed preferential gene transfer in the heart (see, e.g., Lin-Yanga et al., PNAS, Mar. 10, 2009, vol. 106, no. 10). Administration may be systemic or local. A dosage of about 1-10×10¹⁴ vector genomes are contemplated for systemic administration. See also, e.g., Eulalio et al. (2012) Nature 492:376 and Somasuntharam et al. (2013) Biomaterials 34:7790, the teachings of which can be adapted for and/or applied to the compositions, systems, described herein.

[0556] For example, US Patent Publication No. 20110023139, the teachings of which can be adapted for and/or applied to the compositions, systems, described herein describes use of zinc finger nucleases to genetically modify cells, animals and proteins associated with cardiovascular disease. Cardiovascular diseases generally include high blood pressure, heart attacks, heart failure, and stroke and TIA. Any chromosomal sequence involved in cardiovascular disease or the protein encoded by any chromosomal sequence involved in cardiovascular disease may be utilized in the methods described in this disclosure. The cardiovascular-related proteins are typically selected based on an experimental association of the cardiovascular-related protein to the development of cardiovascular disease. For example, the production rate or circulating concentration of a cardiovascular-related protein may be elevated or depressed in a population having a cardiovascular disorder relative to a population lacking the cardiovascular disorder. Differences in protein levels may be assessed using proteomic techniques including but not limited to Western blot, immunohistochemical staining, enzyme linked immunosorbent assay (ELISA), and mass spectrometry. Alternatively, the cardiovascular-related proteins may be identified by obtaining gene expression profiles of the genes encoding the proteins using genomic techniques including but not limited to DNA microarray analysis, serial analysis of gene expression (SAGE), and quantitative real-time polymerase chain reaction (Q-PCR).

[0557] The compositions, systems, herein can be used for treating diseases of the muscular system. The present invention also contemplates delivering the composition, system, described herein, effector protein systems, to muscle(s).

[0558] In one embodiment, the muscle disease to be treated is a muscle dystrophy such as DMD. In one embodiment, the composition, system, such as a system capable of RNA modification, described herein can be used to achieve exon skipping to achieve correction of the diseased gene. As used herein, the term “exon skipping” refers to the modification of pre-mRNA splicing by the targeting of splice donor and/or acceptor sites within a pre-mRNA with one or more complementary antisense oligonucleotide(s) (AONs). By blocking access of a spliceosome to one or more splice donor or acceptor site, an AON may prevent a splicing reaction thereby causing the deletion of one or more exons from a fully-processed mRNA. Exon skipping may be achieved in the nucleus during the maturation process of pre-mRNAs. In some examples, exon skipping may include the masking of key sequences involved in the splicing of targeted exons by using a composition, system, described herein capable of RNA modification. In one embodiment, exon skipping can be achieved in dystrophin mRNA. In one embodiment, the composition, system, can induce exon skipping at exon 1, 2, 3, 4, 5, 6, 7, 8, 10, 11, 12, 13, 14, 15, 16, 17, 18, 19, 20, 21, 22, 23, 24, 25, 26, 27, 28, 29, 30, 31, 32, 33, 34, 45, 36, 37, 38, 39, 40, 41, 42, 43, 44, 45, 46, 47, 48, 49, 50, 51, 52, 53, 54, 55, 56, 57, 58, 59, 60, 61, 62, 63, 64, 65, 66, 67, 68, 69, 70, 71, 72, 73, 74, 75, 76, 77, 78, 79, or any combination thereof of the dystrophin mRNA. In one embodiment, the composition, system, can induce exon skipping at exon 43, 44, 50, 51, 52, 55, or any combination thereof of the dystrophin mRNA. Mutations in these exons, can also be corrected using non-exon skipping polynucleotide modification methods.

[0559] In one embodiment, for treatment of a muscle disease, the method of Bortolanza et al. Molecular Therapy vol. 19 no. 11, 2055-264 Nov. 2011) may be applied to an AAV expressing IsrB polypeptide nuclease and injected into humans at a dosage of about 2×10¹⁵ or 2×10¹⁶ vg of vector. The teachings of Bortolanza et al., can be adapted for and/or applied to the compositions, systems, described herein.

[0560] In one embodiment, the method of Dumonceaux et al. (Molecular Therapy vol. 18 no. 5, 881-887 May 2010) may be applied to an AAV expressing IsrB polypeptide nuclease and injected into humans, for example, at a dosage of about 10¹⁴ to about 10₁₅ vg of vector. The teachings of Dumonceaux described herein can be adapted for and/or applied to the compositions, systems, described herein.

[0561] In one embodiment, the method of Kinouchi et al. (Gene Therapy (2008) 15, 1126-1130) may be applied to compositions described herein and injected into a human, for example, at a dosage of about 500 to 1000 ml of a 40 μM solution into the muscle.

[0562] In one embodiment, the method of Hagstrom et al. (Molecular Therapy Vol. 10, No. 2, August 2004) can be adapted for and/or applied to the compositions, systems, herein and injected at a dose of about 15 to about 50 mg into the great saphenous vein of a human.

[0563] In one embodiment, the method comprise treating a sickle cell related disease, e.g., sickle cell trait, sickle cell disease such as sickle cell anemia, β-thalassaemia. For example, the method and system may be used to modify the genome of the sickle cell, e.g., by correcting one or more mutations of the β-globin gene. In the case of β-thalassaemia, sickle cell anemia can be corrected by modifying HSCs with the systems. The system allows the specific editing of the cell's genome by cutting its DNA and then letting it repair itself. The IscB polypeptide nuclease is inserted and directed by a RNA guide to the mutated point and then it cuts the DNA at that point. Simultaneously, a healthy version of the sequence is inserted. This sequence is used by the cell's own repair system to fix the induced cut. In this way, the IsrB polypeptide nuclease allows the correction of the mutation in the previously obtained stem cells. The methods and systems may be used to correct HSCs as to sickle cell anemia using a system that targets and corrects the mutation (e.g., with a suitable HDR template that delivers a coding sequence for β-globin, advantageously non-sickling β-globin); specifically, the ωRNA can target mutation that give rise to sickle cell anemia, and the HDR can provide coding for proper expression of β-globin. An ωRNA that targets the mutation-and-IsrB polypeptide nuclease containing particle is contacted with HSCs carrying the mutation. The particle also can contain a suitable HDR template to correct the mutation for proper expression of β-globin; or the HSC can be contacted with a second particle or a vector that contains or delivers the HDR template. The so contacted cells can be administered; and optionally treated/expanded; cf. Cartier. The HDR template can provide for the HSC to express an engineered β-globin gene (e.g., BA-T87Q), or β-globin.

### Treating Diseases of the Liver and Kidney

[0564] In one embodiment, the composition, system, or component thereof described herein can be used to treat a disease of the kidney or liver. Thus, in one embodiment, delivery of the composition or component thereof described herein is to the liver or kidney.

[0565] Delivery strategies to induce cellular uptake of the therapeutic nucleic acid include physical force or vector systems such as viral-, lipid- or complex-based delivery, or nanocarriers. From the initial applications with less possible clinical relevance, when nucleic acids were addressed to renal cells with hydrodynamic high-pressure injection systemically, a wide range of gene therapeutic viral and non-viral carriers have been applied already to target posttranscriptional events in different animal kidney disease models in vivo (Csaba Révész and Péter Hamar (2011). Delivery Methods to Target RNAs in the Kidney, Gene Therapy Applications, Prof. Chunsheng Kang (Ed.), ISBN: 978-953-307-541-9, InTech, Available from: www.intechopen.com/books/gene-therapy-applications/delivery-methods-to-target-rnas-inthe-kidney). Delivery methods to the kidney may include those in Yuan et al. (Am J Physiol Renal Physiol 295: F605-F617, 2008). The method of Yuang et al. may be applied to the composition of the present invention contemplating a 1-2 g subcutaneous injection of IsrB polypeptide nuclease conjugated with cholesterol to a human for delivery to the kidneys. In one embodiment, the method of Molitoris et al. (J Am Soc Nephrol 20:1754-1764, 2009) can be adapted to the composition and a cumulative dose of 12-20 mg/kg to a human can be used for delivery to the proximal tubule cells of the kidneys. In one embodiment, the methods of Thompson et al. (Nucleic Acid Therapeutics, Volume 22, Number 4, 2012) can be adapted to the compositions and a dose of up to 25 mg/kg can be delivered via i.v. administration. In one embodiment, the method of Shimizu et al. (J Am Soc Nephrol 21:622-633, 2010) can be adapted to the compositions and a dose of about of 10-20 μmol compositions complexed with nanocarriers in about 1-2 liters of a physiologic fluid for i.p. administration can be used.

[0566] Other various delivery vehicles can be used to deliver the composition, system to the kidney such as viral, hydrodynamic, lipid, polymer nanoparticles, aptamers and various combinations thereof (see e.g. Larson et al., Surgery, (August 2007), Vol. 142, No. 2, pp. (262-269); Hamar et al., Proc Natl Acad Sci, (October 2004), Vol. 101, No. 41, pp. (14883-14888); Zheng et al., Am J Pathol, (October 2008), Vol. 173, No. 4, pp. (973-980); Feng et al., Transplantation, (May 2009), Vol. 87, No. 9, pp. (1283-1289); Q. Zhang et al., PloS ONE, (July 2010), Vol. 5, No. 7, e11709, pp. (1-13); Kushibikia et al., J Controlled Release, (July 2005), Vol. 105, No. 3, pp. (318-331); Wang et al., Gene Therapy, (July 2006), Vol. 13, No. 14, pp. (1097-1103); Kobayashi et al., Journal of Pharmacology and Experimental Therapeutics, (February 2004), Vol. 308, No. 2, pp. (688-693); Wolfrum et al., Nature Biotechnology, (September 2007), Vol. 25, No. 10, pp. (1149-1157); Molitoris et al., J Am Soc Nephrol, (August 2009), Vol. 20, No. 8 pp. (1754-1764); Mikhaylova et al., Cancer Gene Therapy, (March 2011), Vol. 16, No. 3, pp. (217-226); Y. Zhang et al., J Am Soc Nephrol, (April 2006), Vol. 17, No. 4, pp. (1090-1101); Singhal et al., Cancer Res, (May 2009), Vol. 69, No. 10, pp. (4244-4251); Malek et al., Toxicology and Applied Pharmacology, (April 2009), Vol. 236, No. 1, pp. (97-108); Shimizu et al., J Am Soc Nephrology, (April 2010), Vol. 21, No. 4, pp. (622-633); Jiang et al., Molecular Pharmaceutics, (May-June 2009), Vol. 6, No. 3, pp. (727-737); Cao et al, J Controlled Release, (June 2010), Vol. 144, No. 2, pp. (203-212); Ninichuk et al., Am J Pathol, (March 2008), Vol. 172, No. 3, pp. (628-637); Purschke et al., Proc Natl Acad Sci, (March 2006), Vol. 103, No. 13, pp. (5173-5178).

[0567] In one embodiment, delivery is to liver cells. In one embodiment, the liver cell is a hepatocyte. Delivery of the composition and system herein may be via viral vectors, especially AAV (and in particular AAV2/6) vectors. These can be administered by intravenous injection. A preferred target for the liver, whether in vitro or in vivo, is the albumin gene. This is a so-called ‘safe harbor” as albumin is expressed at very high levels and so some reduction in the production of albumin following successful gene editing is tolerated. It is also preferred as the high levels of expression seen from the albumin promoter/enhancer allows for useful levels of correct or transgene production (from the inserted recombination template) to be achieved even if only a small fraction of hepatocytes are edited. See sites identified by Wechsler et al. (reported at the 57th Annual Meeting and Exposition of the American Society of Hematology—abstract available online at ash.confex.com/ash/2015/webprogram/Paper86495.html and presented on 6th December 2015) which can be adapted for use with the compositions, systems, herein.

[0568] Exemplary liver and kidney diseases that can be treated and/or prevented are described elsewhere herein.

### Treating Epithelial and Lung Diseases

[0569] In one embodiment, the disease treated or prevented by the composition and system described herein can be a lung or epithelial disease. The compositions and systems described herein can be used for treating epithelial and/or lung diseases. The present invention also contemplates delivering the composition, system, described herein, to one or both lungs.

[0570] In one embodiment, as viral vector can be used to deliver the composition, system, or component thereof to the lungs. In one embodiment, the AAV is an AAV-1, AAV-2, AAV-5, AAV-6, and/or AAV-9 for delivery to the lungs. (see, e.g., Li et al., Molecular Therapy, vol. 17 no. 12, 2067-277 Dec. 2009). In one embodiment, the MOI can vary from 1×10³ to 4×10⁵ vector genomes/cell. In one embodiment, the delivery vector can be an RSV vector as in Zamora et al. (Am J Respir Crit Care Med Vol 183. pp 531-538, 2011. The method of Zamora et al. may be applied to the nucleic acid-targeting system of the present invention and an aerosolized composition, for example with a dosage of 0.6 mg/kg, may be contemplated for the present invention.

[0571] Subjects treated for a lung disease may for example receive pharmaceutically effective amount of aerosolized AAV vector system per lung endobronchially delivered while spontaneously breathing. As such, aerosolized delivery is preferred for AAV delivery in general. An adenovirus or an AAV particle may be used for delivery. Suitable gene constructs, each operably linked to one or more regulatory sequences, may be cloned into the delivery vector. In this instance, the following constructs are provided as examples: Cbh or EF1α promoter for Cas, U6 or H1 promoter for ωRNA),: A preferred arrangement is to use a CFTRdelta508 targeting guide, a repair template for deltaF508 mutation and a codon optimized composition, with optionally one or more nuclear localization signal or sequence(s) (NLS(s)), e.g., two (2) NLSs.

### Treating Diseases of the Skin

[0572] The compositions and systems described herein can be used for the treatment of skin diseases. The present invention also contemplates delivering the composition and system, described herein, to the skin.

[0573] In one embodiment, delivery to the skin (intradermal delivery) of the composition, system, or component thereof can be via one or more microneedles or microneedle containing device. For example, In one embodiment the device and methods of Hickerson et al. (Molecular Therapy-Nucleic Acids (2013) 2, e129) can be used and/or adapted to deliver the composition, system, described herein, for example, at a dosage of up to 300 μl of 0.1 mg/ml compositions to the skin.

[0574] In one embodiment, the methods and techniques of Leachman et al. (Molecular Therapy, vol. 18 no. 2, 442-446 Feb. 2010) can be used and/or adapted for delivery of a compositions described herein to the skin.

[0575] In one embodiment, the methods and techniques of Zheng et al. (PNAS, Jul. 24, 2012, vol. 109, no. 30, 11975-11980) can be used and/or adapted for nanoparticle delivery of a compositions described herein to the skin. In one embodiment, as dosage of about 25 nM applied in a single application can achieve gene knockdown in the skin.

### Treating Cancer

[0576] The compositions, systems, described herein can be used for the treatment of cancer. The present invention also contemplates delivering the composition, system, described herein, to a cancer cell. Also, as is described elsewhere herein the compositions, systems, can be used to modify an immune cell, such as a CAR or CAR T cell, which can then in turn be used to treat and/or prevent cancer. This is also described in International Patent Publication No. WO 2015/161276, the disclosure of which is hereby incorporated by reference and described herein below.

[0577] Target genes suitable for the treatment or prophylaxis of cancer can include those set forth in Tables 7 and 8. In one embodiment, target genes for cancer treatment and prevention can also include those described in International Patent Publication No. WO 2015/048577 the disclosure of which is hereby incorporated by reference and can be adapted for and/or applied to the composition, system, described herein.

### Adoptive Cell Therapy

[0578] The compositions, systems, and components thereof described herein can be used to modify cells for an adoptive cell therapy. In an aspect of the invention, methods and compositions which involve editing a target nucleic acid sequence, or modulating expression of a target nucleic acid sequence, and applications thereof in connection with cancer immunotherapy are comprehended by adapting the composition, system, of the present invention. In some examples, the compositions, systems, and methods may be used to modify a stem cell (e.g., induced pluripotent cell) to derive modified natural killer cells, gamma delta T cells, and alpha beta T cells, which can be used for the adoptive cell therapy. In certain examples, the compositions, systems, and methods may be used to modify modified natural killer cells, gamma delta T cells, and alpha beta T cells.

[0579] As used herein, “ACT”, “adoptive cell therapy” and “adoptive cell transfer” may be used interchangeably. In an embodiment, Adoptive cell therapy (ACT) can refer to the transfer of cells to a patient with the goal of transferring the functionality and characteristics into the new host by engraftment of the cells (see, e.g., Mettananda et al., Editing an α-globin enhancer in primary human hematopoietic stem cells as a treatment for-thalassemia, Nat Commun. 2017 Sep. 4; 8 (1): 424). As used herein, the term “engraft” or “engraftment” refers to the process of cell incorporation into a tissue of interest in vivo through contact with existing cells of the tissue. Adoptive cell therapy (ACT) can refer to the transfer of cells, most commonly immune-derived cells, back into the same patient or into a new recipient host with the goal of transferring the immunologic functionality and characteristics into the new host. If possible, use of autologous cells helps the recipient by minimizing GVHD issues. The adoptive transfer of autologous tumor infiltrating lymphocytes (TIL) (Zacharakis et al., (2018) Nat Med. 2018 June; 24 (6): 724-730; Besser et al., (2010) Clin. Cancer Res 16 (9) 2646-55; Dudley et al., (2002) Science 298 (5594): 850-4; and Dudley et al., (2005) Journal of Clinical Oncology 23 (10): 2346-57.) or genetically re-directed peripheral blood mononuclear cells (Johnson et al., (2009) Blood 114 (3): 535-46; and Morgan et al., (2006) Science 314 (5796) 126-9) has been used to successfully treat patients with advanced solid tumors, including melanoma, metastatic breast cancer and colorectal carcinoma, as well as patients with CD19-expressing hematologic malignancies (Kalos et al., (2011) Science Translational Medicine 3 (95): 95ra73). In an embodiment, allogenic cells immune cells are transferred (see, e.g., Ren et al., (2017) Clin Cancer Res 23 (9) 2255-2266). As described further herein, allogenic cells can be edited to reduce alloreactivity and prevent graft-versus-host disease. Thus, use of allogenic cells allows for cells to be obtained from healthy donors and prepared for use in patients as opposed to preparing autologous cells from a patient after diagnosis.

[0580] Aspects of the invention involve the adoptive transfer of immune system cells, such as T cells, specific for selected antigens, such as tumor associated antigens or tumor specific neoantigens (see, e.g., Maus et al., 2014, Adoptive Immunotherapy for Cancer or Viruses, Annual Review of Immunology, Vol. 32:189-225; Rosenberg and Restifo, 2015, Adoptive cell transfer as personalized immunotherapy for human cancer, Science Vol. 348 no. 6230 pp. 62-68; Restifo et al., 2015, Adoptive immunotherapy for cancer: harnessing the T cell response. Nat. Rev. Immunol. 12 (4): 269-281; and Jenson and Riddell, 2014, Design and implementation of adoptive therapy with chimeric antigen receptor-modified T cells. Immunol Rev. 257 (1): 127-144; and Rajasagi et al., 2014, Systematic identification of personal tumor-specific neoantigens in chronic lymphocytic leukemia. Blood. 2014 Jul. 17; 124 (3): 453-62).

[0581] In an embodiment, an antigen (such as a tumor antigen) to be targeted in adoptive cell therapy (such as particularly CAR or TCR T-cell therapy) of a disease (such as particularly of tumor or cancer) may be selected from a group consisting of: MRI (see, e.g., Crowther, et al., 2020, Genome-wide CRISPR-Cas9 screening reveals ubiquitous T cell cancer targeting via the monomorphic MHC class I-related protein MRI, Nature Immunology vol. 21, pages 178-185), B cell maturation antigen (BCMA) (see, e.g., Friedman et al., Effective Targeting of Multiple BCMA-Expressing Hematological Malignancies by Anti-BCMA CAR T Cells, Hum Gene Ther. 2018 Mar. 8; Berdeja J G, et al. Durable clinical responses in heavily pretreated patients with relapsed/refractory multiple myeloma: updated results from a multicenter study of bb2121 anti-Bcma CAR T cell therapy. Blood. 2017; 130:740; and Mouhieddine and Ghobrial, Immunotherapy in Multiple Myeloma: The Era of CAR T Cell Therapy, Hematologist, May-June 2018, Volume 15, issue 3); PSA (prostate-specific antigen); prostate-specific membrane antigen (PSMA); PSCA (Prostate stem cell antigen); Tyrosine-protein kinase transmembrane receptor ROR1; fibroblast activation protein (FAP); Tumor-associated glycoprotein 72 (TAG72); Carcinoembryonic antigen (CEA); Epithelial cell adhesion molecule (EPCAM); Mesothelin; Human Epidermal growth factor Receptor 2 (ERBB2 (Her2/neu)); Prostase; Prostatic acid phosphatase (PAP); elongation factor 2 mutant (ELF2M); Insulin-like growth factor 1 receptor (IGF-1R); gplOO; BCR-ABL (breakpoint cluster region-Abelson); tyrosinase; New York esophageal squamous cell carcinoma 1 (NY-ESO-1); K-light chain, LAGE (L antigen); MAGE (melanoma antigen); Melanoma-associated antigen 1 (MAGE-A1); MAGE A3; MAGE A6; legumain; Human papillomavirus (HPV) E6; HPV E7; prostein; survivin; PCTAI (Galectin 8); Melan-A/MART-1; Ras mutant; TRP-1 (tyrosinase related protein 1, or gp75); Tyrosinase-related Protein 2 (TRP2); TRP-2/INT2 (TRP-2/intron 2); RAGE (renal antigen); receptor for advanced glycation end products 1 (RAGE1); Renal ubiquitous 1, 2 (RU1, RU2); intestinal carboxyl esterase (ICE); Heat shock protein 70-2 (HSP70-2) mutant; thyroid stimulating hormone receptor (TSHR); CD123; CD171; CD19; CD20; CD22; CD26; CD30; CD33; CD44v7/8 (cluster of differentiation 44, exons 7/8); CD53; CD92; CD100; CD148; CD150; CD200; CD261; CD262; CD362; CS-1 (CD2 subset 1, CRACC, SLAMF7, CD319, and 19A24); C-type lectin-like molecule-1 (CLL-1); ganglioside GD3 (aNeu5Ac (2-8) aNeu5Ac (2-3) bDGalp (1-4) bDGlcp (1-1) Cer); Tn antigen (Tn Ag); Fms-Like Tyrosine Kinase 3 (FLT3); CD38; CD138; CD44v6; B7H3 (CD276); KIT (CD117); Interleukin-13 receptor subunit alpha-2 (IL-13Ra2); Interleukin 11 receptor alpha (IL-11Ra); prostate stem cell antigen (PSCA); Protease Serine 21 (PRSS21); vascular endothelial growth factor receptor 2 (VEGFR2); Lewis (Y) antigen; CD24; Platelet-derived growth factor receptor beta (PDGFR-beta); stage-specific embryonic antigen-4 (SSEA-4); Mucin 1, cell surface associated (MUC1); mucin 16 (MUC16); epidermal growth factor receptor (EGFR); epidermal growth factor receptor variant III (EGFRvIII); neural cell adhesion molecule (NCAM); carbonic anhydrase IX (CAIX); Proteasome (Prosome, Macropain) Subunit, Beta Type, 9 (LMP2); ephrin type-A receptor 2 (EphA2); Ephrin B2; Fucosyl GM1; sialyl Lewis adhesion molecule (sLe); ganglioside GM3 (aNeu5Ac (2-3)bDGalp(1-4)bDGlcp(1-1)Cer); TGS5; high molecular weight-melanoma-associated antigen (HMWMAA); o-acetyl-GD2 ganglioside (OAcGD2); Folate receptor alpha; Folate receptor beta; tumor endothelial marker 1 (TEM1/CD248); tumor endothelial marker 7-related (TEM7R); claudin 6 (CLDN6); G protein-coupled receptor class C group 5, member D (GPRC5D); chromosome X open reading frame 61 (CXORF61); CD97; CD179a; anaplastic lymphoma kinase (ALK); Polysialic acid; placenta-specific 1 (PLAC1); hexasaccharide portion of globoH glycoceramide (GloboH); mammary gland differentiation antigen (NY-BR-1); uroplakin 2 (UPK2); Hepatitis A virus cellular receptor 1 (HAVCR1); adrenoceptor beta 3 (ADRB3); pannexin 3 (PANX3); G protein-coupled receptor 20 (GPR20); lymphocyte antigen 6 complex, locus K 9 (LY6K); Olfactory receptor 51E2 (OR51E2); TCR Gamma Alternate Reading Frame Protein (TARP); Wilms tumor protein (WT1); ETS translocation-variant gene 6, located on chromosome 12p (ETV6-AML); sperm protein 17 (SPA17); X Antigen Family, Member 1A (XAGE1); angiopoietin-binding cell surface receptor 2 (Tie 2); CT (cancer/testis (antigen)); melanoma cancer testis antigen-1 (MAD-CT-1); melanoma cancer testis antigen-2 (MAD-CT-2); Fos-related antigen 1; p53; p53 mutant; human Telomerase reverse transcriptase (hTERT); sarcoma translocation breakpoints; melanoma inhibitor of apoptosis (ML-IAP); ERG (transmembrane protease, serine 2 (TMPRSS2) ETS fusion gene); N-Acetyl glucosaminyl-transferase V (NA17); paired box protein Pax-3 (PAX3); Androgen receptor; Cyclin B1; Cyclin D1; v-myc avian myelocytomatosis viral oncogene neuroblastoma derived homolog (MYCN); Ras Homolog Family Member C (RhoC); Cytochrome P450 1B1 (CYP1B1); CCCTC-Binding Factor (Zinc Finger Protein)-Like (BORIS); Squamous Cell Carcinoma Antigen Recognized By T Cells-1 or 3 (SART1, SART3); Paired box protein Pax-5 (PAX5); proacrosin binding protein sp32 (OY-TES1); lymphocyte-specific protein tyrosine kinase (LCK); A kinase anchor protein 4 (AKAP-4); synovial sarcoma, X breakpoint-1, -2, -3 or -4 (SSX1, SSX2, SSX3, SSX4); CD79a; CD79b; CD72; Leukocyte-associated immunoglobulin-like receptor 1 (LAIR1); Fc fragment of IgA receptor (FCAR); Leukocyte immunoglobulin-like receptor subfamily A member 2 (LILRA2); CD300 molecule-like family member f (CD300LF); C-type lectin domain family 12 member A (CLEC12A); bone marrow stromal cell antigen 2 (BST2); EGF-like module-containing mucin-like hormone receptor-like 2 (EMR2); lymphocyte antigen 75 (LY75); Glypican-3 (GPC3); Fc receptor-like 5 (FCRL5); mouse double minute 2 homolog (MDM2); livin; alphafetoprotein (AFP); transmembrane activator and CAML Interactor (TACI); B-cell activating factor receptor (BAFF-R); V-Ki-ras2 Kirsten rat sarcoma viral oncogene homolog (KRAS); immunoglobulin lambda-like polypeptide 1 (IGLL1); 707-AP (707 alanine proline); ART-4 (adenocarcinoma antigen recognized by T4 cells); BAGE (B antigen; b-catenin/m, b-catenin/mutated); CAMEL (CTL-recognized antigen on melanoma); CAP1 (carcinoembryonic antigen peptide 1); CASP-8 (caspase-8); CDC27m (cell-division cycle 27 mutated); CDK4/m (cycline-dependent kinase 4 mutated); Cyp-B (cyclophilin B); DAM (differentiation antigen melanoma); EGP-2 (epithelial glycoprotein 2); EGP-40 (epithelial glycoprotein 40); Erbb2, 3, 4 (erythroblastic leukemia viral oncogene homolog-2, -3, 4); FBP (folate binding protein); fAchR (Fetal acetylcholine receptor); G250 (glycoprotein (N-250); GAGE (G antigen); GnT-V acetylglucosaminyltransferase V); HAGE (helicose antigen); ULA-A (human leukocyte antigen-A); HST2 (human signet ring tumor 2); KIAA0205; KDR (kinase insert domain receptor); LDLR/FUT (low density lipid receptor/GDP L-fucose: b-D-galactosidase 2-a-L fucosyltransferase); LICAM (L1 cell adhesion molecule); MC1R (melanocortin 1 receptor); Myosin/m (myosin mutated); MUM-1, -2, -3 (melanoma ubiquitous mutated 1, 2, 3); NA88-A (NA cDNA clone of patient M88); KG2D (Natural killer group 2, member D) ligands; oncofetal antigen (h5T4); p190 minor bcr-abl (protein of 190KD bcr-abl); Pml/RARa (promyelocytic leukemia/retinoic acid receptor a); PRAME (preferentially expressed antigen of melanoma); SAGE (sarcoma antigen); TEL/AML1 (translocation Ets-family leukemia/acute myeloid leukemia 1); TPI/m (triosephosphate isomerase mutated); CD70; and any combination thereof.

[0582] In an embodiment, an antigen to be targeted in adoptive cell therapy (such as particularly CAR or TCR T-cell therapy) of a disease (such as particularly of tumor or cancer) is a tumor-specific antigen (TSA).

[0583] In an embodiment, an antigen to be targeted in adoptive cell therapy (such as particularly CAR or TCR T-cell therapy) of a disease (such as particularly of tumor or cancer) is a neoantigen.

[0584] In an embodiment, an antigen to be targeted in adoptive cell therapy (such as particularly CAR or TCR T-cell therapy) of a disease (such as particularly of tumor or cancer) is a tumor-associated antigen (TAA).

[0585] In an embodiment, an antigen to be targeted in adoptive cell therapy (such as particularly CAR or TCR T-cell therapy) of a disease (such as particularly of tumor or cancer) is a universal tumor antigen. In certain preferred embodiments, the universal tumor antigen is selected from the group consisting of: a human telomerase reverse transcriptase (hTERT), survivin, mouse double minute 2 homolog (MDM2), cytochrome P450 1B 1 (CYP1B), HER2/neu, Wilms' tumor gene 1 (WT1), livin, alphafetoprotein (AFP), carcinoembryonic antigen (CEA), mucin 16 (MUC16), MUC1, prostate-specific membrane antigen (PSMA), p53, cyclin (DI), and any combinations thereof.

[0586] In an embodiment, an antigen (such as a tumor antigen) to be targeted in adoptive cell therapy (such as particularly CAR or TCR T-cell therapy) of a disease (such as particularly of tumor or cancer) may be selected from a group consisting of: CD19, BCMA, CD70, CLL-1, MAGE A3, MAGE A6, HPV E6, HPV E7, WT1, CD22, CD171, ROR1, MUC16, and SSX2.

[0587] In certain preferred embodiments, the antigen may be CD19. For example, CD19 may be targeted in hematologic malignancies, such as in lymphomas, more particularly in B-cell lymphomas, such as without limitation in diffuse large B-cell lymphoma, primary mediastinal b-cell lymphoma, transformed follicular lymphoma, marginal zone lymphoma, mantle cell lymphoma, acute lymphoblastic leukemia including adult and pediatric ALL, non-Hodgkin lymphoma, indolent non-Hodgkin lymphoma, or chronic lymphocytic leukemia. For example, BCMA may be targeted in multiple myeloma or plasma cell leukemia (see, e.g., 2018 American Association for Cancer Research (AACR) Annual meeting Poster: Allogeneic Chimeric Antigen Receptor T Cells Targeting B Cell Maturation Antigen). For example, CLL1 may be targeted in acute myeloid leukemia. For example, MAGE A3, MAGE A6, SSX2, and/or KRAS may be targeted in solid tumors. For example, HPV E6 and/or HPV E7 may be targeted in cervical cancer or head and neck cancer. For example, WT1 may be targeted in acute myeloid leukemia (AML), myelodysplastic syndromes (MDS), chronic myeloid leukemia (CML), non-small cell lung cancer, breast, pancreatic, ovarian or colorectal cancers, or mesothelioma. For example, CD22 may be targeted in B cell malignancies, including non-Hodgkin lymphoma, diffuse large B-cell lymphoma, or acute lymphoblastic leukemia. For example, CD171 may be targeted in neuroblastoma, glioblastoma, or lung, pancreatic, or ovarian cancers. For example, ROR1 may be targeted in ROR1+ malignancies, including non-small cell lung cancer, triple negative breast cancer, pancreatic cancer, prostate cancer, ALL, chronic lymphocytic leukemia, or mantle cell lymphoma. For example, MUC16 may be targeted in MUC16ecto+ epithelial ovarian, fallopian tube or primary peritoneal cancer. For example, CD70 may be targeted in both hematologic malignancies as well as in solid cancers such as renal cell carcinoma (RCC), gliomas (e.g., GBM), and head and neck cancers (HNSCC). CD70 is expressed in both hematologic malignancies as well as in solid cancers, while its expression in normal tissues is restricted to a subset of lymphoid cell types (see, e.g., 2018 American Association for Cancer Research (AACR) Annual meeting Poster: Allogeneic CRISPR Engineered Anti-CD70 CAR-T Cells Demonstrate Potent Preclinical Activity Against Both Solid and Hematological Cancer Cells).

[0588] Various strategies may for example be employed to genetically modify T cells by altering the specificity of the T cell receptor (TCR) for example by introducing new TCR a and B chains with selected peptide specificity (see U.S. Pat. No. 8,697,854; PCT Patent Publications: WO2003020763, WO2004033685, WO2004044004, WO2005114215, WO2006000830, WO2008038002, WO2008039818, WO2004074322, WO2005113595, WO2006125962, WO2013166321, WO2013039889, WO2014018863, WO2014083173; U.S. Pat. No. 8,088,379).

[0589] As an alternative to, or addition to, TCR modifications, chimeric antigen receptors (CARs) may be used in order to generate immunoresponsive cells, such as T cells, specific for selected targets, such as malignant cells, with a wide variety of receptor chimera constructs having been described (see U.S. Pat. Nos. 5,843,728; 5,851,828; 5,912,170; 6,004,811; 6,284,240; 6,392,013; 6,410,014; 6,753,162; 8,211,422; and, PCT Publication WO 9215322).

[0590] In general, CARs are comprised of an extracellular domain, a transmembrane domain, and an intracellular domain, wherein the extracellular domain comprises an antigen-binding domain that is specific for a predetermined target. While the antigen-binding domain of a CAR is often an antibody or antibody fragment (e.g., a single chain variable fragment, scFv), the binding domain is not particularly limited so long as it results in specific recognition of a target. For example, In one embodiment, the antigen-binding domain may comprise a receptor, such that the CAR is capable of binding to the ligand of the receptor. Alternatively, the antigen-binding domain may comprise a ligand, such that the CAR is capable of binding the endogenous receptor of that ligand.

[0591] The antigen-binding domain of a CAR is generally separated from the transmembrane domain by a hinge or spacer. The spacer is also not particularly limited, and it is designed to provide the CAR with flexibility. For example, a spacer domain may comprise a portion of a human Fc domain, including a portion of the CH3 domain, or the hinge region of any immunoglobulin, such as IgA, IgD, IgE, IgG, or IgM, or variants thereof. Furthermore, the hinge region may be modified so as to prevent off-target binding by FcRs or other potential interfering objects. For example, the hinge may comprise an IgG4 Fc domain with or without a S228P, L235E, and/or N297Q mutation (according to Kabat numbering) in order to decrease binding to FcRs. Additional spacers/hinges include, but are not limited to, CD4, CD8, and CD28 hinge regions.

[0592] The transmembrane domain of a CAR may be derived either from a natural or from a synthetic source. Where the source is natural, the domain may be derived from any membrane bound or transmembrane protein. Transmembrane regions of particular use in this disclosure may be derived from CD8, CD28, CD3, CD45, CD4, CD5, CD5, CD9, CD 16, CD22, CD33, CD37, CD64, CD80, CD86, CD 134, CD137, CD 154, TCR. Alternatively, the transmembrane domain may be synthetic, in which case it will comprise predominantly hydrophobic residues such as leucine and valine. Preferably a triplet of phenylalanine, tryptophan and valine will be found at each end of a synthetic transmembrane domain. Optionally, a short oligo- or polypeptide linker, preferably between 2 and 10 amino acids in length may form the linkage between the transmembrane domain and the cytoplasmic signaling domain of the CAR. A glycine-serine doublet provides a particularly suitable linker.

[0593] Alternative CAR constructs may be characterized as belonging to successive generations. First-generation CARs typically consist of a single-chain variable fragment of an antibody specific for an antigen, for example comprising a VL linked to a VH of a specific antibody, linked by a flexible linker, for example by a CD8a hinge domain and a CD8a transmembrane domain, to the transmembrane and intracellular signaling domains of either CD3ζ or FcRγ (scFv-CD3ζ or scFv-FcRγ; see U.S. Pat. Nos. 7,741,465; 5,912,172; 5,906,936). Second-generation CARs incorporate the intracellular domains of one or more costimulatory molecules, such as CD28, OX40 (CD134), or 4-1BB (CD137) within the endodomain (for example scFv-CD28/OX40/4-1BB-CD32; see U.S. Pat. Nos. 8,911,993; 8,916,381; 8,975,071; 9,101,584; 9,102,760; 9,102,761). Third-generation CARs include a combination of costimulatory endodomains, such a CD35-chain, CD97, GDI 1a-CD18, CD2, ICOS, CD27, CD154, CDS, OX40, 4-1BB, CD2, CD7, LIGHT, LFA-1, NKG2C, B7-H3, CD30, CD40, PD-1, or CD28 signaling domains (for example scFv-CD28-4-1BB-CD3ζ or scFv-CD28-OX40-CD32; see U.S. Pat. Nos. 8,906,682; 8,399,645; 5,686,281; PCT Publication No. WO 2014/134165; PCT Publication No. WO 2012/079000). In an embodiment, the primary signaling domain comprises a functional signaling domain of a protein selected from the group consisting of CD3 zeta, CD3 gamma, CD3 delta, CD3 epsilon, common FcR gamma (FCERIG), FcR beta (Fc Epsilon R1b), CD79a, CD79b, Fc gamma RIIa, DAP10, and DAP12. In certain preferred embodiments, the primary signaling domain comprises a functional signaling domain of CD3ζ or FcRγ. In an embodiment, the one or more costimulatory signaling domains comprise a functional signaling domain of a protein selected, each independently, from the group consisting of: CD27, CD28, 4-1BB (CD137), OX40, CD30, CD40, PD-1, ICOS, lymphocyte function-associated antigen-1 (LFA-1), CD2, CD7, LIGHT, NKG2C, B7-H3, a ligand that specifically binds with CD83, CDS, ICAM-1, GITR, BAFFR, HVEM (LIGHTR), SLAMF7, NKp80 (KLRF1), CD160, CD19, CD4, CD8 alpha, CD8 beta, IL2R beta, IL2R gamma, IL7R alpha, ITGA4, VLA1, CD49a, ITGA4, IA4, CD49D, ITGA6, VLA-6, CD49f, ITGAD, CD11d, ITGAE, CD103, ITGAL, CD11a, LFA-1, ITGAM, CD11b, ITGAX, CD11c, ITGB1, CD29, ITGB2, CD18, ITGB7, TNFR2, TRANCE/RANKL, DNAM1 (CD226), SLAMF4 (CD244, 2B4), CD84, CD96 (Tactile), CEACAM1, CRTAM, Ly9 (CD229), CD160 (BY55), PSGL1, CD100 (SEMA4D), CD69, SLAMF6 (NTB-A, Ly108), SLAM (SLAMF1, CD150, IPO-3), BLAME (SLAMF8), SELPLG (CD162), LTBR, LAT, GADS, SLP-76, PAG/Cbp, NKp44, NKp30, NKp46, and NKG2D. In an embodiment, the one or more costimulatory signaling domains comprise a functional signaling domain of a protein selected, each independently, from the group consisting of: 4-1BB, CD27, and CD28. In an embodiment, a chimeric antigen receptor may have the design as described in U.S. Pat. No. 7,446,190, comprising an intracellular domain of CD3ζ chain (such as amino acid residues 52-163 of the human CD3 zeta chain, as shown in SEQ ID NO: 14 of U.S. Pat. No. 7,446,190), a signaling region from CD28 and an antigen-binding element (or portion or domain; such as scFv). The CD28 portion, when between the zeta chain portion and the antigen-binding element, may suitably include the transmembrane and signaling domains of CD28 (such as amino acid residues 114-220 of SEQ ID NO: 10, full sequence shown in SEQ ID NO: 6 of U.S. Pat. No. 7,446,190; these can include the following portion of CD28 as set forth in Genbank identifier NM_006139. Alternatively, when the zeta sequence lies between the CD28 sequence and the antigen-binding element, intracellular domain of CD28 can be used alone (such as amino sequence set forth in SEQ ID NO: 9 of U.S. Pat. No. 7,446,190). Hence, an embodiment employ a CAR comprising (a) a zeta chain portion comprising the intracellular domain of human CD3 chain, (b) a costimulatory signaling region, and (c) an antigen-binding element (or portion or domain), wherein the costimulatory signaling region comprises the amino acid sequence encoded by SEQ ID NO: 6 of U.S. Pat. No. 7,446,190.

[0594] Alternatively, costimulation may be orchestrated by expressing CARs in antigen-specific T cells, chosen so as to be activated and expanded following engagement of their native αβTCR, for example by antigen on professional antigen-presenting cells, with attendant costimulation. In addition, additional engineered receptors may be provided on the immunoresponsive cells, for example to improve targeting of a T-cell attack and/or minimize side effects.

[0595] By means of an example and without limitation, Kochenderfer et al., (2009) J Immunother. 32 (7): 689-702 described anti-CD19 chimeric antigen receptors (CAR). FMC63-28Z CAR contained a single chain variable region moiety (scFv) recognizing CD19 derived from the FMC63 mouse hybridoma (described in Nicholson et al., (1997) Molecular Immunology 34:1157-1165), a portion of the human CD28 molecule, and the intracellular component of the human TCR-(molecule. FMC63-CD828BBZ CAR contained the FMC63 scFv, the hinge and transmembrane regions of the CD8 molecule, the cytoplasmic portions of CD28 and 4-1BB, and the cytoplasmic component of the TCR-¿ molecule. The exact sequence of the CD28 molecule included in the FMC63-28Z CAR corresponded to Genbank identifier NM_006139; the sequence included all amino acids starting with the amino acid sequence IEVMYPPPY (SEQ ID NO: 1565) and continuing all the way to the carboxy-terminus of the protein. To encode the anti-CD19 scFv component of the vector, the authors designed a DNA sequence which was based on a portion of a previously published CAR (Cooper et al., (2003) Blood 101:1637-1644). This sequence encoded the following components in frame from the 5′ end to the 3′ end: an XhoI site, the human granulocyte-macrophage colony-stimulating factor (GM-CSF) receptor α-chain signal sequence, the FMC63 light chain variable region (as in Nicholson et al., supra), a linker peptide (as in Cooper et al., supra), the FMC63 heavy chain variable region (as in Nicholson et al., supra), and a NotI site. A plasmid encoding this sequence was digested with XhoI and NotI. To form the MSGV-FMC63-28Z retroviral vector, the XhoI and NotI-digested fragment encoding the FMC63 scFv was ligated into a second XhoI and NotI-digested fragment that encoded the MSGV retroviral backbone (as in Hughes et al., (2005) Human Gene Therapy 16:457-472) as well as part of the extracellular portion of human CD28, the entire transmembrane and cytoplasmic portion of human CD28, and the cytoplasmic portion of the human TCR-ζ molecule (as in Maher et al., 2002) Nature Biotechnology 20:70-75). The FMC63-28Z CAR is included in the KTE-C19 (axicabtagene ciloleucel) anti-CD19 CAR-T therapy product in development by Kite Pharma, Inc. for the treatment of inter alia patients with relapsed/refractory aggressive B-cell non-Hodgkin lymphoma (NHL). Accordingly, in an embodiment, cells intended for adoptive cell therapies, more particularly immunoresponsive cells such as T cells, may express the FMC63-28Z CAR as described by Kochenderfer et al. (supra). Hence, in an embodiment, cells intended for adoptive cell therapies, more particularly immunoresponsive cells such as T cells, may comprise a CAR comprising an extracellular antigen-binding element (or portion or domain; such as scFv) that specifically binds to an antigen, an intracellular signaling domain comprising an intracellular domain of a CD3 chain, and a costimulatory signaling region comprising a signaling domain of CD28. Preferably, the CD28 amino acid sequence is as set forth in Genbank identifier NM_006139 (sequence version 1, 2 or 3) starting with the amino acid sequence IEVMYPPPY (SEQ ID NO: 1565) and continuing all the way to the carboxy-terminus of the protein. Preferably, the antigen is CD19, more preferably the antigen-binding element is an anti-CD19 scFv, even more preferably the anti-CD19 scFv as described by Kochenderfer et al. (supra).

[0596] Additional anti-CD19 CARS are further described in International Patent Publication No. WO 2015/187528. More particularly Example 1 and Table 1 of WO2015187528, incorporated by reference herein, demonstrate the generation of anti-CD19 CARs based on a fully human anti-CD19 monoclonal antibody (47G4, as described in US20100104509) and murine anti-CD19 monoclonal antibody (as described in Nicholson et al. and explained above). Various combinations of a signal sequence (human CD8-alpha or GM-CSF receptor), extracellular and transmembrane regions (human CD8-alpha) and intracellular T-cell signaling domains (CD28-CD3ζ; 4-1BB-CD3ζ; CD27-CD3ζ; CD28-CD27-CD3ζ, 4-1BB-CD27-CD3ζ; CD27-4-1BB-CD3ζ; CD28-CD27-Fc RI gamma chain; or CD28-Fc RI gamma chain) were disclosed. Hence, in an embodiment, cells intended for adoptive cell therapies, more particularly immunoresponsive cells such as T cells, may comprise a CAR comprising an extracellular antigen-binding element that specifically binds to an antigen, an extracellular and transmembrane region as set forth in Table 1 of WO2015187528 and an intracellular T-cell signaling domain as set forth in Table 1 of No. WO 2015/187528. Preferably, the antigen is CD19, more preferably the antigen-binding element is an anti-CD19 scFv, even more preferably the mouse or human anti-CD 19 scFv as described in Example 1 of. WO 2015/187528. In an embodiment, the CAR comprises, consists essentially of or consists of an amino acid sequence of SEQ ID NO: 1, SEQ ID NO: 2, SEQ ID NO: 3, SEQ ID NO: 4, SEQ ID NO: 5, SEQ ID NO: 6, SEQ ID NO: 7, SEQ ID NO: 8, SEQ ID NO: 9, SEQ ID NO: 10, SEQ ID NO: 11, SEQ ID NO: 12, or SEQ ID NO: 13 as set forth in Table 1 of WO2015187528.

[0597] By means of an example and without limitation, chimeric antigen receptor that recognizes the CD70 antigen is described in WO2012058460A2 (see also, Park et al., CD70 as a target for chimeric antigen receptor T cells in head and neck squamous cell carcinoma, Oral Oncol. 2018 March; 78:145-150; and Jin et al., CD70, a novel target of CAR T-cell therapy for gliomas, Neuro Oncol. 2018 Jan. 10; 20 (1): 55-65). CD70 is expressed by diffuse large B-cell and follicular lymphoma and also by the malignant cells of Hodgkins lymphoma, Waldenstrom's macroglobulinemia and multiple myeloma, and by HTLV-1- and EBV-associated malignancies. (Agathanggelou et al. Am. J. Pathol. 1995; 147:1152-1160; Hunter et al., Blood 2004; 104:4881. 26; Lens et al., J Immunol. 2005; 174:6212-6219; Baba et al., J Virol. 2008; 82:3843-3852.) In addition, CD70 is expressed by non-hematological malignancies such as renal cell carcinoma and glioblastoma. (Junker et al., J Urol. 2005; 173:2150-2153; Chahlavi et al., Cancer Res 2005; 65:5428-5438) Physiologically, CD70 expression is transient and restricted to a subset of highly activated T, B, and dendritic cells.

[0598] By means of an example and without limitation, chimeric antigen receptor that recognizes BCMA has been described (see, e.g., US20160046724A1; WO2016014789A2; WO2017211900A1; WO2015158671A1; US20180085444A1; WO2018028647A1; US20170283504A1; and WO2013154760A1).

[0599] In an embodiment, the immune cell may, in addition to a CAR or exogenous TCR as described herein, further comprise a chimeric inhibitory receptor (inhibitory CAR) that specifically binds to a second target antigen and is capable of inducing an inhibitory or immunosuppressive or repressive signal to the cell upon recognition of the second target antigen. In an embodiment, the chimeric inhibitory receptor comprises an extracellular antigen-binding element (or portion or domain) configured to specifically bind to a target antigen, a transmembrane domain, and an intracellular immunosuppressive or repressive signaling domain. In an embodiment, the second target antigen is an antigen that is not expressed on the surface of a cancer cell or infected cell or the expression of which is downregulated on a cancer cell or an infected cell. In an embodiment, the second target antigen is an MHC-class I molecule. In an embodiment, the intracellular signaling domain comprises a functional signaling portion of an immune checkpoint molecule, such as for example PD-1 or CTLA4. Advantageously, the inclusion of such inhibitory CAR reduces the chance of the engineered immune cells attacking non-target (e.g., non-cancer) tissues.

[0600] Alternatively, T-cells expressing CARs may be further modified to reduce or eliminate expression of endogenous TCRs in order to reduce off-target effects. Reduction or elimination of endogenous TCRs can reduce off-target effects and increase the effectiveness of the T cells (U.S. Pat. No. 9,181,527). T cells stably lacking expression of a functional TCR may be produced using a variety of approaches. T cells internalize, sort, and degrade the entire T cell receptor as a complex, with a half-life of about 10 hours in resting T cells and 3 hours in stimulated T cells (von Essen, M. et al. 2004. J. Immunol. 173:384-393). Proper functioning of the TCR complex requires the proper stoichiometric ratio of the proteins that compose the TCR complex. TCR function also requires two functioning TCR zeta proteins with ITAM motifs. The activation of the TCR upon engagement of its MHC-peptide ligand requires the engagement of several TCRs on the same T cell, which all must signal properly. Thus, if a TCR complex is destabilized with proteins that do not associate properly or cannot signal optimally, the T cell will not become activated sufficiently to begin a cellular response.

[0601] Accordingly, in one embodiment, TCR expression may eliminated using RNA interference (e.g., shRNA, siRNA, miRNA, etc.), IscB polypeptide or CRISPR-associated IscB polypeptide nuclease, or other methods that target the nucleic acids encoding specific TCRs (e.g., TCR-α and TCR-β) and/or CD3 chains in primary T cells. By blocking expression of one or more of these proteins, the T cell will no longer produce one or more of the key components of the TCR complex, thereby destabilizing the TCR complex and preventing cell surface expression of a functional TCR.

[0602] In some instances, CAR may also comprise a switch mechanism for controlling expression and/or activation of the CAR. For example, a CAR may comprise an extracellular, transmembrane, and intracellular domain, in which the extracellular domain comprises a target-specific binding element that comprises a label, binding domain, or tag that is specific for a molecule other than the target antigen that is expressed on or by a target cell. In such embodiments, the specificity of the CAR is provided by a second construct that comprises a target antigen binding domain (e.g., an scFv or a bispecific antibody that is specific for both the target antigen and the label or tag on the CAR) and a domain that is recognized by or binds to the label, binding domain, or tag on the CAR. See, e.g., WO 2013/044225, WO 2016/000304, WO 2015/057834, WO 2015/057852, WO 2016/070061, U.S. Pat. No. 9,233,125, US 2016/0129109. In this way, a T-cell that expresses the CAR can be administered to a subject, but the CAR cannot bind its target antigen until the second composition comprising an antigen-specific binding domain is administered.

[0603] Alternative switch mechanisms include CARs that require multimerization in order to activate their signaling function (see, e.g., US Patent Publication Nos. US 2015/0368342, US 2016/0175359, US 2015/0368360) and/or an exogenous signal, such as a small molecule drug (US 2016/0166613, Yung et al., Science, 2015), in order to elicit a T-cell response. Some CARs may also comprise a “suicide switch” to induce cell death of the CAR T-cells following treatment (Buddee et al., PLOS One, 2013) or to downregulate expression of the CAR following binding to the target antigen (International Patent Publication No. WO 2016/011210).

[0604] Alternative techniques may be used to transform target immunoresponsive cells, such as protoplast fusion, lipofection, transfection or electroporation. A wide variety of vectors may be used, such as retroviral vectors, lentiviral vectors, adenoviral vectors, adeno-associated viral vectors, plasmids or transposons, such as a Sleeping Beauty transposon (see U.S. Pat. Nos. 6,489,458; 7,148,203; 7,160,682; 7,985,739; 8,227,432), may be used to introduce CARs, for example using 2nd generation antigen-specific CARs signaling through CD3ζ and either CD28 or CD137. Viral vectors may for example include vectors based on HIV, SV40, EBV, HSV or BPV.

[0605] Cells that are targeted for transformation may for example include T cells, Natural Killer (NK) cells, cytotoxic T lymphocytes (CTL), regulatory T cells, human embryonic stem cells, tumor-infiltrating lymphocytes (TIL) or a pluripotent stem cell from which lymphoid cells may be differentiated. T cells expressing a desired CAR may for example be selected through co-culture with γ-irradiated activating and propagating cells (AaPC), which co-express the cancer antigen and co-stimulatory molecules. The engineered CAR T-cells may be expanded, for example by co-culture on AaPC in presence of soluble factors, such as IL-2 and IL-21. This expansion may for example be carried out so as to provide memory CAR+ T cells (which may for example be assayed by non-enzymatic digital array and/or multi-panel flow cytometry). In this way, CAR T cells may be provided that have specific cytotoxic activity against antigen-bearing tumors (optionally in conjunction with production of desired chemokines such as interferon-γ). CAR T cells of this kind may for example be used in animal models, for example to treat tumor xenografts.

[0606] In an embodiment, ACT includes co-transferring CD4+ Th1 cells and CD8+ CTLs to induce a synergistic antitumor response (see, e.g., Li et al., Adoptive cell therapy with CD4+ T helper 1 cells and CD8+ cytotoxic T cells enhances complete rejection of an established tumor, leading to generation of endogenous memory responses to non-targeted tumor epitopes. Clin Transl Immunology. 2017 October; 6 (10): e160).

[0607] In an embodiment, Th 17 cells are transferred to a subject in need thereof. Th17 cells have been reported to directly eradicate melanoma tumors in mice to a greater extent than Th1 cells (Muranski P, et al., Tumor-specific Th17-polarized cells eradicate large established melanoma. Blood. 2008 Jul. 15; 112 (2): 362-73; and Martin-Orozco N, et al., T helper 17 cells promote cytotoxic T cell activation in tumor immunity. Immunity. 2009 Nov. 20; 31 (5): 787-98). Those studies involved an adoptive T cell transfer (ACT) therapy approach, which takes advantage of CD4+ T cells that express a TCR recognizing tyrosinase tumor antigen. Exploitation of the TCR leads to rapid expansion of Th17 populations to large numbers ex vivo for reinfusion into the autologous tumor-bearing hosts.

[0608] In an embodiment, ACT may include autologous iPSC-based vaccines, such as irradiated iPSCs in autologous anti-tumor vaccines (see e.g., Kooreman, Nigel G. et al., Autologous iPSC-Based Vaccines Elicit Anti-tumor Responses In Vivo, Cell Stem Cell 22, 1-13, 2018, doi.org/10.1016/j.stem.2018.01.016).

[0609] Unlike T-cell receptors (TCRs) that are MHC restricted, CARs can potentially bind any cell surface-expressed antigen and can thus be more universally used to treat patients (see Irving et al., Engineering Chimeric Antigen Receptor T-Cells for Racing in Solid Tumors: Don't Forget the Fuel, Front. Immunol., 3 Apr. 2017, doi.org/10.3389/fimmu.2017.00267). In an embodiment, in the absence of endogenous T-cell infiltrate (e.g., due to aberrant antigen processing and presentation), which precludes the use of TIL therapy and immune checkpoint blockade, the transfer of CAR T-cells may be used to treat patients (see, e.g., Hinrichs C S, Rosenberg S A. Exploiting the curative potential of adoptive T-cell therapy for cancer. Immunol Rev (2014) 257 (1): 56-71. doi: 10.1111/imr.12132).

[0610] Approaches such as the foregoing may be adapted to provide methods of treating and/or increasing survival of a subject having a disease, such as a neoplasia, for example by administering an effective amount of an immunoresponsive cell comprising an antigen recognizing receptor that binds a selected antigen, wherein the binding activates the immunoresponsive cell, thereby treating or preventing the disease (such as a neoplasia, a pathogen infection, an autoimmune disorder, or an allogeneic transplant reaction).

[0611] In an embodiment, the treatment can be administered after lymphodepleting pretreatment in the form of chemotherapy (typically a combination of cyclophosphamide and fludarabine) or radiation therapy. Initial studies in ACT had short lived responses and the transferred cells did not persist in vivo for very long (Houot et al., T-cell-based immunotherapy: adoptive cell transfer and checkpoint inhibition. Cancer Immunol Res (2015) 3 (10): 1115-22; and Kamta et al., Advancing Cancer Therapy with Present and Emerging Immuno-Oncology Approaches. Front. Oncol. (2017) 7:64). Immune suppressor cells like Tregs and MDSCs may attenuate the activity of transferred cells by outcompeting them for the necessary cytokines. Not being bound by a theory lymphodepleting pretreatment may eliminate the suppressor cells allowing the TILs to persist.

[0612] In one embodiment, the treatment can be administrated into patients undergoing an immunosuppressive treatment (e.g., glucocorticoid treatment). The cells, or population of cells, may be made resistant to at least one immunosuppressive agent due to the inactivation of a gene encoding a receptor for such immunosuppressive agent. In an embodiment, the immunosuppressive treatment provides for the selection and expansion of the immunoresponsive T cells within the patient.

[0613] In an embodiment, the treatment can be administered before primary treatment (e.g., surgery or radiation therapy) to shrink a tumor before the primary treatment. In another embodiment, the treatment can be administered after primary treatment to remove any remaining cancer cells.

[0614] In an embodiment, immunometabolic barriers can be targeted therapeutically prior to and/or during ACT to enhance responses to ACT or CAR T-cell therapy and to support endogenous immunity (see, e.g., Irving et al., Engineering Chimeric Antigen Receptor T-Cells for Racing in Solid Tumors: Don't Forget the Fuel, Front. Immunol., 3 Apr. 2017, doi.org/10.3389/fimmu.2017.00267).

[0615] The administration of cells or population of cells, such as immune system cells or cell populations, such as more particularly immunoresponsive cells or cell populations, as disclosed herein may be carried out in any convenient manner, including by aerosol inhalation, injection, ingestion, transfusion, implantation or transplantation. The cells or population of cells may be administered to a patient subcutaneously, intradermally, intratumorally, intranodally, intramedullary, intramuscularly, intrathecally, by intravenous or intralymphatic injection, or intraperitoneally. In one embodiment, the disclosed CARs may be delivered or administered into a cavity formed by the resection of tumor tissue (i.e. intracavity delivery) or directly into a tumor prior to resection (i.e. intratumoral delivery). In one embodiment, the cell compositions of the present invention are preferably administered by intravenous injection.

[0616] The administration of the cells or population of cells can consist of the administration of 104-109 cells per kg body weight, preferably 105 to 106 cells/kg body weight including all integer values of cell numbers within those ranges. Dosing in CAR T cell therapies may for example involve administration of from 106 to 109 cells/kg, with or without a course of lymphodepletion, for example with cyclophosphamide. The cells or population of cells can be administrated in one or more doses. In another embodiment, the effective amount of cells are administrated as a single dose. In another embodiment, the effective amount of cells are administrated as more than one dose over a period time. Timing of administration is within the judgment of managing physician and depends on the clinical condition of the patient. The cells or population of cells may be obtained from any source, such as a blood bank or a donor. While individual needs vary, determination of optimal ranges of effective amounts of a given cell type for a particular disease or conditions are within the skill of one in the art. An effective amount means an amount which provides a therapeutic or prophylactic benefit. The dosage administrated will be dependent upon the age, health and weight of the recipient, kind of concurrent treatment, if any, frequency of treatment and the nature of the effect desired.

[0617] In another embodiment, the effective amount of cells or composition comprising those cells are administrated parenterally. The administration can be an intravenous administration. The administration can be directly done by injection within a tumor.

[0618] To guard against possible adverse reactions, engineered immunoresponsive cells may be equipped with a transgenic safety switch, in the form of a transgene that renders the cells vulnerable to exposure to a specific signal. For example, the herpes simplex viral thymidine kinase (TK) gene may be used in this way, for example by introduction into allogeneic T lymphocytes used as donor lymphocyte infusions following stem cell transplantation (Greco, et al., Improving the safety of cell therapy with the TK-suicide gene. Front. Pharmacol. 2015; 6:95). In such cells, administration of a nucleoside prodrug such as ganciclovir or acyclovir causes cell death. Alternative safety switch constructs include inducible caspase 9, for example triggered by administration of a small-molecule dimerizer that brings together two nonfunctional icasp9 molecules to form the active enzyme. A wide variety of alternative approaches to implementing cellular proliferation controls have been described (see U.S. Patent Publication No. 20130071414; International Patent Publication WO 2011/146862; International Patent Publication WO 2014/011987; International Patent Publication WO 2013/040371; Zhou et al. BLOOD, 2014, 123/25:3895-3905; Di Stasi et al., The New England Journal of Medicine 2011; 365:1673-1683; Sadelain M, The New England Journal of Medicine 2011; 365:1735-173; Ramos et al., Stem Cells 28 (6): 1107-15 (2010)).

[0619] In a further refinement of adoptive therapies, genome editing may be used to tailor immunoresponsive cells to alternative implementations, for example providing edited CAR T cells (see Poirot et al., 2015, Multiplex genome edited T-cell manufacturing platform for “off-the-shelf” adoptive T-cell immunotherapies, Cancer Res 75 (18): 3853; Ren et al., 2017, Multiplex genome editing to generate universal CAR T cells resistant to PD1 inhibition, Clin Cancer Res. 2017 May 1; 23 (9): 2255-2266. doi: 10.1158/1078-0432.CCR-16-1300. Epub 2016 Nov. 4; Qasim et al., 2017, Molecular remission of infant B-ALL after infusion of universal TALEN gene-edited CAR T cells, Sci Transl Med. 2017 Jan. 25; 9 (374); Legut, et al., 2018, CRISPR-mediated TCR replacement generates superior anticancer transgenic T cells. Blood, 131 (3), 311-322; and Georgiadis et al., Long Terminal Repeat CRISPR-CAR-Coupled “Universal” T Cells Mediate Potent Anti-leukemic Effects, Molecular Therapy, In Press, Corrected Proof, Available online 6 Mar. 2018). Cells may be edited using any CRISPR system and method of use thereof as described herein. The composition and systems may be delivered to an immune cell by any method described herein. In preferred embodiments, cells are edited ex vivo and transferred to a subject in need thereof. Immunoresponsive cells, CAR T cells or any cells used for adoptive cell transfer may be edited. Editing may be performed for example to insert or knock-in an exogenous gene, such as an exogenous gene encoding a CAR or a TCR, at a preselected locus in a cell (e.g. TRAC locus); to eliminate potential alloreactive T-cell receptors (TCR) or to prevent inappropriate pairing between endogenous and exogenous TCR chains, such as to knock-out or knock-down expression of an endogenous TCR in a cell; to disrupt the target of a chemotherapeutic agent in a cell; to block an immune checkpoint, such as to knock-out or knock-down expression of an immune checkpoint protein or receptor in a cell; to knock-out or knock-down expression of other gene or genes in a cell, the reduced expression or lack of expression of which can enhance the efficacy of adoptive therapies using the cell; to knock-out or knock-down expression of an endogenous gene in a cell, said endogenous gene encoding an antigen targeted by an exogenous CAR or TCR; to knock-out or knock-down expression of one or more MHC constituent proteins in a cell; to activate a T cell; to modulate cells such that the cells are resistant to exhaustion or dysfunction; and/or increase the differentiation and/or proliferation of functionally exhausted or dysfunctional CD8+ T-cells (see International Patent Publication Nos. WO 2013/176915, WO 2014/059173, WO 2014/172606, WO 2014/184744, and WO 2014/191128).

[0620] In an embodiment, editing may result in inactivation of a gene. By inactivating a gene, it is intended that the gene of interest is not expressed in a functional protein form. In a particular embodiment, the system specifically catalyzes cleavage in one targeted gene thereby inactivating said targeted gene. The nucleic acid strand breaks caused are commonly repaired through the distinct mechanisms of homologous recombination or non-homologous end joining (NHEJ). However, NHEJ is an imperfect repair process that often results in changes to the DNA sequence at the site of the cleavage. Repair via non-homologous end joining (NHEJ) often results in small insertions or deletions (Indel) and can be used for the creation of specific gene knockouts. Cells in which a cleavage induced mutagenesis event has occurred can be identified and/or selected by well-known methods in the art. In an embodiment, homology directed repair (HDR) is used to concurrently inactivate a gene (e.g., TRAC) and insert an endogenous TCR or CAR into the inactivated locus.

[0621] Hence, in an embodiment, editing of cells, particularly cells intended for adoptive cell therapies, more particularly immunoresponsive cells such as T cells, may be performed to insert or knock-in an exogenous gene, such as an exogenous gene encoding a CAR or a TCR, at a preselected locus in a cell. Conventionally, nucleic acid molecules encoding CARs or TCRs are transfected or transduced to cells using randomly integrating vectors, which, depending on the site of integration, may lead to clonal expansion, oncogenic transformation, variegated transgene expression and/or transcriptional silencing of the transgene. Directing of transgene(s) to a specific locus in a cell can minimize or avoid such risks and advantageously provide for uniform expression of the transgene(s) by the cells. Without limitation, suitable ‘safe harbor’ loci for directed transgene integration include CCR5 or AAVS1. Homology-directed repair (HDR) strategies are known and described elsewhere in this specification allowing to insert transgenes into desired loci (e.g., TRAC locus).

[0622] Further suitable loci for insertion of transgenes, in particular CAR or exogenous TCR transgenes, include without limitation loci comprising genes coding for constituents of endogenous T-cell receptor, such as T-cell receptor alpha locus (TRA) or T-cell receptor beta locus (TRB), for example T-cell receptor alpha constant (TRAC) locus, T-cell receptor beta constant 1 (TRBC1) locus or T-cell receptor beta constant 2 (TRBC1) locus. Advantageously, insertion of a transgene into such locus can simultaneously achieve expression of the transgene, potentially controlled by the endogenous promoter, and knock-out expression of the endogenous TCR. This approach has been exemplified in Eyquem et al., (2017) Nature 543:113-117, wherein the authors used CRISPR/Cas9 gene editing to knock-in a DNA molecule encoding a CD19-specific CAR into the TRAC locus downstream of the endogenous promoter; the CAR-T cells obtained by CRISPR were significantly superior in terms of reduced tonic CAR signaling and exhaustion.

[0623] T cell receptors (TCR) are cell surface receptors that participate in the activation of T cells in response to the presentation of antigen. The TCR is generally made from two chains, α and β, which assemble to form a heterodimer and associates with the CD3-transducing subunits to form the T cell receptor complex present on the cell surface. Each α and β chain of the TCR consists of an immunoglobulin-like N-terminal variable (V) and constant (C) region, a hydrophobic transmembrane domain, and a short cytoplasmic region. As for immunoglobulin molecules, the variable region of the α and β chains are generated by V (D) J recombination, creating a large diversity of antigen specificities within the population of T cells. However, in contrast to immunoglobulins that recognize intact antigen, T cells are activated by processed peptide fragments in association with an MHC molecule, introducing an extra dimension to antigen recognition by T cells, known as MHC restriction. Recognition of MHC disparities between the donor and recipient through the T cell receptor leads to T cell proliferation and the potential development of graft versus host disease (GVHD). The inactivation of TCRα or TCRβ can result in the elimination of the TCR from the surface of T cells preventing recognition of alloantigen and thus GVHD. However, TCR disruption generally results in the elimination of the CD3 signaling component and alters the means of further T cell expansion.

[0624] Hence, in an embodiment, editing of cells, particularly cells intended for adoptive cell therapies, more particularly immunoresponsive cells such as T cells, may be performed to knock-out or knock-down expression of an endogenous TCR in a cell. For example, NHEJ-based or HDR-based gene editing approaches can be employed to disrupt the endogenous TCR alpha and/or beta chain genes. For example, gene editing system or systems, such as IscB system or systems, can be designed to target a sequence found within the TCR beta chain conserved between the beta 1 and beta 2 constant region genes (TRBC1 and TRBC2) and/or to target the constant region of the TCR alpha chain (TRAC) gene.

[0625] Allogeneic cells are rapidly rejected by the host immune system. It has been demonstrated that, allogeneic leukocytes present in non-irradiated blood products will persist for no more than 5 to 6 days (Boni, Muranski et al. 2008 Blood 1; 112 (12): 4746-54). Thus, to prevent rejection of allogeneic cells, the host's immune system usually has to be suppressed to some extent. However, in the case of adoptive cell transfer the use of immunosuppressive drugs also have a detrimental effect on the introduced therapeutic T cells. Therefore, to effectively use an adoptive immunotherapy approach in these conditions, the introduced cells would need to be resistant to the immunosuppressive treatment. Thus, in a particular embodiment, the present invention further comprises a step of modifying T cells to make them resistant to an immunosuppressive agent, preferably by inactivating at least one gene encoding a target for an immunosuppressive agent. An immunosuppressive agent is an agent that suppresses immune function by one of several mechanisms of action. An immunosuppressive agent can be, but is not limited to a calcineurin inhibitor, a target of rapamycin, an interleukin-2 receptor α-chain blocker, an inhibitor of inosine monophosphate dehydrogenase, an inhibitor of dihydrofolic acid reductase, a corticosteroid or an immunosuppressive antimetabolite. The present invention allows conferring immunosuppressive resistance to T cells for immunotherapy by inactivating the target of the immunosuppressive agent in T cells. As non-limiting examples, targets for an immunosuppressive agent can be a receptor for an immunosuppressive agent such as: CD52, glucocorticoid receptor (GR), a FKBP family gene member and a cyclophilin family gene member.

[0626] In an embodiment, editing of cells, particularly cells intended for adoptive cell therapies, more particularly immunoresponsive cells such as T cells, may be performed to block an immune checkpoint, such as to knock-out or knock-down expression of an immune checkpoint protein or receptor in a cell. Immune checkpoints are inhibitory pathways that slow down or stop immune reactions and prevent excessive tissue damage from uncontrolled activity of immune cells. In an embodiment, the immune checkpoint targeted is the programmed death-1 (PD-1 or CD279) gene (PDCD1). In other embodiments, the immune checkpoint targeted is cytotoxic T-lymphocyte-associated antigen (CTLA-4). In additional embodiments, the immune checkpoint targeted is another member of the CD28 and CTLA4 Ig superfamily such as BTLA, LAG3, ICOS, PDL1 or KIR. In further additional embodiments, the immune checkpoint targeted is a member of the TNFR superfamily such as CD40, OX40, CD137, GITR, CD27 or TIM-3.

[0627] Additional immune checkpoints include Src homology 2 domain-containing protein tyrosine phosphatase 1 (SHP-1) (Watson H A, et al., SHP-1: the next checkpoint target for cancer immunotherapy? Biochem Soc Trans. 2016 Apr. 15; 44 (2): 356-62). SHP-1 is a widely expressed inhibitory protein tyrosine phosphatase (PTP). In T-cells, it is a negative regulator of antigen-dependent activation and proliferation. It is a cytosolic protein, and therefore not amenable to antibody-mediated therapies, but its role in activation and proliferation makes it an attractive target for genetic manipulation in adoptive transfer strategies, such as chimeric antigen receptor (CAR) T cells. Immune checkpoints may also include T cell immunoreceptor with Ig and ITIM domains (TIGIT/Vstm3/WUCAM/VSIG9) and VISTA (Le Mercier I, et al., (2015) Beyond CTLA-4 and PD-1, the generation Z of negative checkpoint regulators. Front. Immunol. 6:418).

[0628] International Patent Publication No. WO 2014/172606 relates to the use of MT1 and/or MT2 inhibitors to increase proliferation and/or activity of exhausted CD8+ T-cells and to decrease CD8+ T-cell exhaustion (e.g., decrease functionally exhausted or unresponsive CD8+ immune cells). In an embodiment, metallothioneins are targeted by gene editing in adoptively transferred T cells.

[0629] In an embodiment, targets of gene editing may be at least one targeted locus involved in the expression of an immune checkpoint protein. Such targets may include, but are not limited to CTLA4, PPP2CA, PPP2CB, PTPN6, PTPN22, PDCD1, ICOS (CD278), PDL1, KIR, LAG3, HAVCR2, BTLA, CD160, TIGIT, CD96, CRTAM, LAIR1, SIGLEC7, SIGLEC9, CD244 (2B4), TNFRSF10B, TNFRSF10A, CASP8, CASP10, CASP3, CASP6, CASP7, FADD, FAS, TGFBRII, TGFRBRI, SMAD2, SMAD3, SMAD4, SMAD10, SKI, SKIL, TGIF1, IL10RA, IL10ORB, HMOX2, IL6R, IL6ST, EIF2AK4, CSK, PAG1, SIT1, FOXP3, PRDM1, BATF, VISTA, GUCY1A2, GUCY1A3, GUCY1B2, GUCY1B3, MT1, MT2, CD40, OX40, CD137, GITR, CD27, SHP-1, TIM-3, CEACAM-1, CEACAM-3, or CEACAM-5. In preferred embodiments, the gene locus involved in the expression of PD-1 or CTLA-4 genes is targeted. In other preferred embodiments, combinations of genes are targeted, such as but not limited to PD-1 and TIGIT.

[0630] By means of an example and without limitation, International Patent Publication No. WO 2016/196388 concerns an engineered T cell comprising (a) a genetically engineered antigen receptor that specifically binds to an antigen, which receptor may be a CAR; and (b) a disrupted gene encoding a PD-L1, an agent for disruption of a gene encoding a PD-L1, and/or disruption of a gene encoding PD-L1, wherein the disruption of the gene may be mediated by a gene editing nuclease, a zinc finger nuclease (ZFN), CRISPR/Cas9 and/or TALEN. WO2015142675 relates to immune effector cells comprising a CAR in combination with an agent (such as the composition or system herein) that increases the efficacy of the immune effector cells in the treatment of cancer, wherein the agent may inhibit an immune inhibitory molecule, such as PD1, PD-L1, CTLA-4, TIM-3, LAG-3, VISTA, BTLA, TIGIT, LAIR1, CD160, 2B4, TGFR beta, CEACAM-1, CEACAM-3, or CEACAM-5. Ren et al., (2017) Clin Cancer Res 23 (9) 2255-2266 performed lentiviral delivery of CAR and electro-transfer of Cas9 mRNA and gRNAs targeting endogenous TCR, β-2 microglobulin (B2M) and PD1 simultaneously, to generate gene-disrupted allogeneic CAR T cells deficient of TCR, HLA class I molecule and PD1.

[0631] In an embodiment, cells may be engineered to express a CAR, wherein expression and/or function of methylcytosine dioxygenase genes (TET1, TET2 and/or TET3) in the cells has been reduced or eliminated, (such as the composition or system herein) (for example, as described in WO201704916).

[0632] In an embodiment, editing of cells, particularly cells intended for adoptive cell therapies, more particularly immunoresponsive cells such as T cells, may be performed to knock-out or knock-down expression of an endogenous gene in a cell, said endogenous gene encoding an antigen targeted by an exogenous CAR or TCR, thereby reducing the likelihood of targeting of the engineered cells. In an embodiment, the targeted antigen may be one or more antigen selected from the group consisting of CD38, CD138, CS-1, CD33, CD26, CD30, CD53, CD92, CD100, CD148, CD150, CD200, CD261, CD262, CD362, human telomerase reverse transcriptase (hTERT), survivin, mouse double minute 2 homolog (MDM2), cytochrome P450 1B1 (CYP1B), HER2/neu, Wilms' tumor gene 1 (WT1), livin, alphafetoprotein (AFP), carcinoembryonic antigen (CEA), mucin 16 (MUC16), MUC1, prostate-specific membrane antigen (PSMA), p53, cyclin (D1), B cell maturation antigen (BCMA), transmembrane activator and CAML Interactor (TACI), and B-cell activating factor receptor (BAFF-R) (for example, as described in International Patent Publication Nos. WO 2016/011210 and WO 2017/011804).

[0633] In an embodiment, editing of cells, particularly cells intended for adoptive cell therapies, more particularly immunoresponsive cells such as T cells, may be performed to knock-out or knock-down expression of one or more MHC constituent proteins, such as one or more HLA proteins and/or beta-2 microglobulin (B2M), in a cell, whereby rejection of non-autologous (e.g., allogeneic) cells by the recipient's immune system can be reduced or avoided. In preferred embodiments, one or more HLA class I proteins, such as HLA-A, B and/or C, and/or B2M may be knocked-out or knocked-down. Preferably, B2M may be knocked-out or knocked-down. By means of an example, Ren et al., (2017) Clin Cancer Res 23 (9) 2255-2266 performed lentiviral delivery of CAR and electro-transfer of Cas mRNA and gRNAs targeting endogenous TCR, β-2 microglobulin (B2M) and PD1 simultaneously, to generate gene-disrupted allogeneic CAR T cells deficient of TCR, HLA class I molecule and PD1.

[0634] In other embodiments, at least two genes are edited. Pairs of genes may include, but are not limited to PD1 and TCRα, PD1 and TCRβ, CTLA-4 and TCRα, CTLA-4 and TCRβ, LAG3 and TCRα, LAG3 and TCRβ, Tim3 and TCRα, Tim3 and TCRβ, BTLA and TCRα, BTLA and TCRβ, BY55 and TCRα, BY55 and TCRβ, TIGIT and TCRα, TIGIT and TCRβ, B7H5 and TCRα, B7H5 and TCRβ, LAIR1 and TCRα, LAIR1 and TCRβ, SIGLEC10 and TCRα, SIGLEC10 and TCRβ, 2B4 and TCRα, 2B4 and TCRβ, B2M and TCRα, B2M and TCRβ.

[0635] In an embodiment, a cell may be multiplied edited (multiplex genome editing) as taught herein to (1) knock-out or knock-down expression of an endogenous TCR (for example, TRBC1, TRBC2 and/or TRAC), (2) knock-out or knock-down expression of an immune checkpoint protein or receptor (for example PD1, PD-L1 and/or CTLA4); and (3) knock-out or knock-down expression of one or more MHC constituent proteins (for example, HLA-A, B and/or C, and/or B2M, preferably B2M).

[0636] Whether prior to or after genetic modification of the T cells, the T cells can be activated and expanded generally using methods as described, for example, in U.S. Pat. Nos. 6,352,694; 6,534,055; 6,905,680; 5,858,358; 6,887,466; 6,905,681; 7,144,575; 7,232,566; 7,175,843; 5,883,223; 6,905,874; 6,797,514; 6,867,041; and 7,572,631. T cells can be expanded in vitro or in vivo.

[0637] Immune cells may be obtained using any method known in the art. In one embodiment, allogenic T cells may be obtained from healthy subjects. In one embodiment T cells that have infiltrated a tumor are isolated. T cells may be removed during surgery. T cells may be isolated after removal of tumor tissue by biopsy. T cells may be isolated by any means known in the art. In one embodiment, T cells are obtained by apheresis. In one embodiment, the method may comprise obtaining a bulk population of T cells from a tumor sample by any suitable method known in the art. For example, a bulk population of T cells can be obtained from a tumor sample by dissociating the tumor sample into a cell suspension from which specific cell populations can be selected. Suitable methods of obtaining a bulk population of T cells may include, but are not limited to, any one or more of mechanically dissociating (e.g., mincing) the tumor, enzymatically dissociating (e.g., digesting) the tumor, and aspiration (e.g., as with a needle).

[0638] The bulk population of T cells obtained from a tumor sample may comprise any suitable type of T cell. Preferably, the bulk population of T cells obtained from a tumor sample comprises tumor infiltrating lymphocytes (TILs).

[0639] The tumor sample may be obtained from any mammal. Unless stated otherwise, as used herein, the term “mammal” refers to any mammal including, but not limited to, mammals of the order Logomorpha, such as rabbits; the order Carnivora, including Felines (cats) and Canines (dogs); the order Artiodactyla, including Bovines (cows) and Swines (pigs); or of the order Perssodactyla, including Equines (horses). The mammals may be non-human primates, e.g., of the order Primates, Ceboids, or Simoids (monkeys) or of the order Anthropoids (humans and apes). In one embodiment, the mammal may be a mammal of the order Rodentia, such as mice and hamsters. Preferably, the mammal is a non-human primate or a human. An especially preferred mammal is the human.

[0640] T cells can be obtained from a number of sources, including peripheral blood mononuclear cells (PBMC), bone marrow, lymph node tissue, spleen tissue, and tumors. In an embodiment of the present invention, T cells can be obtained from a unit of blood collected from a subject using any number of techniques known to the skilled artisan, such as Ficoll separation. In one preferred embodiment, cells from the circulating blood of an individual are obtained by apheresis or leukapheresis. The apheresis product typically contains lymphocytes, including T cells, monocytes, granulocytes, B cells, other nucleated white blood cells, red blood cells, and platelets. In one embodiment, the cells collected by apheresis may be washed to remove the plasma fraction and to place the cells in an appropriate buffer or media for subsequent processing steps. In one embodiment of the invention, the cells are washed with phosphate buffered saline (PBS). In an alternative embodiment, the wash solution lacks calcium and may lack magnesium or may lack many if not all divalent cations. Initial activation steps in the absence of calcium lead to magnified activation. As those of ordinary skill in the art would readily appreciate a washing step may be accomplished by methods known to those in the art, such as by using a semi-automated “flow-through” centrifuge (for example, the Cobe 2991 cell processor) according to the manufacturer's instructions. After washing, the cells may be resuspended in a variety of biocompatible buffers, such as, for example, Ca-free, Mg-free PBS. Alternatively, the undesirable components of the apheresis sample may be removed and the cells directly resuspended in culture media.

[0641] In another embodiment, T cells are isolated from peripheral blood lymphocytes by lysing the red blood cells and depleting the monocytes, for example, by centrifugation through a PERCOLL™ gradient. A specific subpopulation of T cells, such as CD28+, CD4+, CDC, CD45RA+, and CD45RO+ T cells, can be further isolated by positive or negative selection techniques. For example, in one preferred embodiment, T cells are isolated by incubation with anti-CD3/anti-CD28 (i.e., 3×28)-conjugated beads, such as DYNABEADS® M-450 CD3/CD28 T, or XCYTE DYNABEADS™ for a time period sufficient for positive selection of the desired T cells. In one embodiment, the time period is about 30 minutes. In a further embodiment, the time period ranges from 30 minutes to 36 hours or longer and all integer values there between. In a further embodiment, the time period is at least 1, 2, 3, 4, 5, or 6 hours. In yet another preferred embodiment, the time period is 10 to 24 hours. In one preferred embodiment, the incubation time period is 24 hours. For isolation of T cells from patients with leukemia, use of longer incubation times, such as 24 hours, can increase cell yield. Longer incubation times may be used to isolate T cells in any situation where there are few T cells as compared to other cell types, such in isolating tumor infiltrating lymphocytes (TIL) from tumor tissue or from immunocompromised individuals. Further, use of longer incubation times can increase the efficiency of capture of CD8+ T cells.

[0642] Enrichment of a T cell population by negative selection can be accomplished with a combination of antibodies directed to surface markers unique to the negatively selected cells. A preferred method is cell sorting and/or selection via negative magnetic immunoadherence or flow cytometry that uses a cocktail of monoclonal antibodies directed to cell surface markers present on the cells negatively selected. For example, to enrich for CD4+ cells by negative selection, a monoclonal antibody cocktail typically includes antibodies to CD14, CD20, CD11b, CD16, HLA-DR, and CD8.

[0643] Further, monocyte populations (e.g., CD14+ cells) may be depleted from blood preparations by a variety of methodologies, including anti-CD14 coated beads or columns, or utilization of the phagocytotic activity of these cells to facilitate removal. Accordingly, in one embodiment, the invention uses paramagnetic particles of a size sufficient to be engulfed by phagocytotic monocytes. In an embodiment, the paramagnetic particles are commercially available beads, for example, those produced by Life Technologies under the trade name Dynabeads™. In one embodiment, other non-specific cells are removed by coating the paramagnetic particles with “irrelevant” proteins (e.g., serum proteins or antibodies). Irrelevant proteins and antibodies include those proteins and antibodies or fragments thereof that do not specifically target the T cells to be isolated. In an embodiment, the irrelevant beads include beads coated with sheep anti-mouse antibodies, goat anti-mouse antibodies, and human serum albumin.

[0644] In brief, such depletion of monocytes is performed by preincubating T cells isolated from whole blood, apheresed peripheral blood, or tumors with one or more varieties of irrelevant or non-antibody coupled paramagnetic particles at any amount that allows for removal of monocytes (approximately a 20:1 bead: cell ratio) for about 30 minutes to 2 hours at 22 to 37 degrees C., followed by magnetic removal of cells which have attached to or engulfed the paramagnetic particles. Such separation can be performed using standard methods available in the art. For example, any magnetic separation methodology may be used including a variety of which are commercially available, (e.g., DYNAL® Magnetic Particle Concentrator (DYNAL MPC®)). Assurance of requisite depletion can be monitored by a variety of methodologies known to those of ordinary skill in the art, including flow cytometric analysis of CD14 positive cells, before and after depletion.

[0645] For isolation of a desired population of cells by positive or negative selection, the concentration of cells and surface (e.g., particles such as beads) can be varied. In an embodiment, it may be desirable to significantly decrease the volume in which beads and cells are mixed together (i.e., increase the concentration of cells), to ensure maximum contact of cells and beads. For example, in one embodiment, a concentration of 2 billion cells/ml is used. In one embodiment, a concentration of 1 billion cells/ml is used. In a further embodiment, greater than 100 million cells/ml is used. In a further embodiment, a concentration of cells of 10, 15, 20, 25, 30, 35, 40, 45, or 50 million cells/ml is used. In yet another embodiment, a concentration of cells from 75, 80, 85, 90, 95, or 100 million cells/ml is used. In further embodiments, concentrations of 125 or 150 million cells/ml can be used. Using high concentrations can result in increased cell yield, cell activation, and cell expansion. Further, use of high cell concentrations allows more efficient capture of cells that may weakly express target antigens of interest, such as CD28-negative T cells, or from samples where there are many tumor cells present (i.e., leukemic blood, tumor tissue, etc). Such populations of cells may have therapeutic value and would be desirable to obtain. For example, using high concentration of cells allows more efficient selection of CD8+ T cells that normally have weaker CD28 expression.

[0646] In a related embodiment, it may be desirable to use lower concentrations of cells. By significantly diluting the mixture of T cells and surface (e.g., particles such as beads), interactions between the particles and cells is minimized. This selects for cells that express high amounts of desired antigens to be bound to the particles. For example, CD4+ T cells express higher levels of CD28 and are more efficiently captured than CD8+ T cells in dilute concentrations. In one embodiment, the concentration of cells used is 5×106/ml. In other embodiments, the concentration used can be from about 1×105/ml to 1×106/ml, and any integer value in between.

[0647] T cells can also be frozen. Wishing not to be bound by theory, the freeze and subsequent thaw step provides a more uniform product by removing granulocytes and to some extent monocytes in the cell population. After a washing step to remove plasma and platelets, the cells may be suspended in a freezing solution. While many freezing solutions and parameters are known in the art and will be useful in this context, one method involves using PBS containing 20% DMSO and 8% human serum albumin, or other suitable cell freezing media, the cells then are frozen to −80° C. at a rate of 1° per minute and stored in the vapor phase of a liquid nitrogen storage tank. Other methods of controlled freezing may be used as well as uncontrolled freezing immediately at −20° C. or in liquid nitrogen.

[0648] T cells for use in the present invention may also be antigen-specific T cells. For example, tumor-specific T cells can be used. In an embodiment, antigen-specific T cells can be isolated from a patient of interest, such as a patient afflicted with a cancer or an infectious disease. In one embodiment, neoepitopes are determined for a subject and T cells specific to these antigens are isolated. Antigen-specific cells for use in expansion may also be generated in vitro using any number of methods known in the art, for example, as described in U.S. Patent Publication No. US20040224402 entitled, Generation and Isolation of Antigen-Specific T Cells, or in U.S. Pat. No. 6,040,177. Antigen-specific cells for use in the present invention may also be generated using any number of methods known in the art, for example, as described in Current Protocols in Immunology, or Current Protocols in Cell Biology, both published by John Wiley & Sons, Inc., Boston, Mass.

[0649] In a related embodiment, it may be desirable to sort or otherwise positively select (e.g. via magnetic selection) the antigen specific cells prior to or following one or two rounds of expansion. Sorting or positively selecting antigen-specific cells can be carried out using peptide-MHC tetramers (Altman, et al., Science. 1996 Oct. 4; 274 (5284): 94-6). In another embodiment, the adaptable tetramer technology approach is used (Andersen et al., 2012 Nat Protoc. 7:891-902). Tetramers are limited by the need to utilize predicted binding peptides based on prior hypotheses, and the restriction to specific HLAs. Peptide-MHC tetramers can be generated using techniques known in the art and can be made with any MHC molecule of interest and any antigen of interest as described herein. Specific epitopes to be used in this context can be identified using numerous assays known in the art. For example, the ability of a polypeptide to bind to MHC class I may be evaluated indirectly by monitoring the ability to promote incorporation of 1251 labeled B2-microglobulin (B2m) into MHC class I/B2m/peptide heterotrimeric complexes (see Parker et al., J. Immunol. 152:163, 1994).

[0650] In one embodiment cells are directly labeled with an epitope-specific reagent for isolation by flow cytometry followed by characterization of phenotype and TCRs. In one embodiment, T cells are isolated by contacting with T cell specific antibodies. Sorting of antigen-specific T cells, or generally any cells of the present invention, can be carried out using any of a variety of commercially available cell sorters, including, but not limited to, MoFlo sorter (DakoCytomation, Fort Collins, Colo.), FACSAria™, FACSArray™, FACSVantage™, BD™ LSR II, and FACSCalibur™ (BD Biosciences, San Jose, Calif.).

[0651] In a preferred embodiment, the method comprises selecting cells that also express CD3. The method may comprise specifically selecting the cells in any suitable manner. Preferably, the selecting is carried out using flow cytometry. The flow cytometry may be carried out using any suitable method known in the art. The flow cytometry may employ any suitable antibodies and stains. Preferably, the antibody is chosen such that it specifically recognizes and binds to the particular biomarker being selected. For example, the specific selection of CD3, CD8, TIM-3, LAG-3, 4-1BB, or PD-1 may be carried out using anti-CD3, anti-CD8, anti-TIM-3, anti-LAG-3, anti-4-1BB, or anti-PD-1 antibodies, respectively. The antibody or antibodies may be conjugated to a bead (e.g., a magnetic bead) or to a fluorochrome. Preferably, the flow cytometry is fluorescence-activated cell sorting (FACS). TCRs expressed on T cells can be selected based on reactivity to autologous tumors. Additionally, T cells that are reactive to tumors can be selected for based on markers using the methods described in patent publication Nos. WO2014133567 and WO2014133568, herein incorporated by reference in their entirety. Additionally, activated T cells can be selected for based on surface expression of CD107a.

[0652] In one embodiment of the invention, the method further comprises expanding the numbers of T cells in the enriched cell population. Such methods are described in U.S. Pat. No. 8,637,307 and is herein incorporated by reference in its entirety. The numbers of T cells may be increased at least about 3-fold (or 4-, 5-, 6-, 7-, 8-, or 9-fold), more preferably at least about 10-fold (or 20-, 30-, 40-, 50-, 60-, 70-, 80-, or 90-fold), more preferably at least about 100-fold, more preferably at least about 1,000 fold, or most preferably at least about 100,000-fold. The numbers of T cells may be expanded using any suitable method known in the art. Exemplary methods of expanding the numbers of cells are described in patent publication No. WO 2003/057171, U.S. Pat. No. 8,034,334, and U.S. Patent Publication No. 2012/0244133, each of which is incorporated herein by reference.

[0653] In one embodiment, ex vivo T cell expansion can be performed by isolation of T cells and subsequent stimulation or activation followed by further expansion. In one embodiment of the invention, the T cells may be stimulated or activated by a single agent. In another embodiment, T cells are stimulated or activated with two agents, one that induces a primary signal and a second that is a co-stimulatory signal. Ligands useful for stimulating a single signal or stimulating a primary signal and an accessory molecule that stimulates a second signal may be used in soluble form. Ligands may be attached to the surface of a cell, to an Engineered Multivalent Signaling Platform (EMSP), or immobilized on a surface. In a preferred embodiment both primary and secondary agents are co-immobilized on a surface, for example a bead or a cell. In one embodiment, the molecule providing the primary activation signal may be a CD3 ligand, and the co-stimulatory molecule may be a CD28 ligand or 4-1BB ligand.

[0654] In an embodiment, T cells comprising a CAR or an exogenous TCR, may be manufactured as described in International Patent Publication No. WO 2015/120096, by a method comprising enriching a population of lymphocytes obtained from a donor subject; stimulating the population of lymphocytes with one or more T-cell stimulating agents to produce a population of activated T cells, wherein the stimulation is performed in a closed system using serum-free culture medium; transducing the population of activated T cells with a viral vector comprising a nucleic acid molecule which encodes the CAR or TCR, using a single cycle transduction to produce a population of transduced T cells, wherein the transduction is performed in a closed system using serum-free culture medium; and expanding the population of transduced T cells for a predetermined time to produce a population of engineered T cells, wherein the expansion is performed in a closed system using serum-free culture medium. In an embodiment, T cells comprising a CAR or an exogenous TCR, may be manufactured as described in WO 2015/120096, by a method comprising: obtaining a population of lymphocytes; stimulating the population of lymphocytes with one or more stimulating agents to produce a population of activated T cells, wherein the stimulation is performed in a closed system using serum-free culture medium; transducing the population of activated T cells with a viral vector comprising a nucleic acid molecule which encodes the CAR or TCR, using at least one cycle transduction to produce a population of transduced T cells, wherein the transduction is performed in a closed system using serum-free culture medium; and expanding the population of transduced T cells to produce a population of engineered T cells, wherein the expansion is performed in a closed system using serum-free culture medium. The predetermined time for expanding the population of transduced T cells may be 3 days. The time from enriching the population of lymphocytes to producing the engineered T cells may be 6 days. The closed system may be a closed bag system. Further provided is population of T cells comprising a CAR or an exogenous TCR obtainable or obtained by said method, and a pharmaceutical composition comprising such cells.

[0655] In an embodiment, T cell maturation or differentiation in vitro may be delayed or inhibited by the method as described in International Patent Publication No. WO 2017/070395, comprising contacting one or more T cells from a subject in need of a T cell therapy with an AKT inhibitor (such as, e.g., one or a combination of two or more AKT inhibitors disclosed in claim 8 of WO2017070395) and at least one of exogenous Interleukin-7 (IL-7) and exogenous Interleukin-15 (IL-15), wherein the resulting T cells exhibit delayed maturation or differentiation, and/or wherein the resulting T cells exhibit improved T cell function (such as, e.g., increased T cell proliferation; increased cytokine production; and/or increased cytolytic activity) relative to a T cell function of a T cell cultured in the absence of an AKT inhibitor.

[0656] In an embodiment, a patient in need of a T cell therapy may be conditioned by a method as described in International Patent Publication No. WO 2016/191756 comprising administering to the patient a dose of cyclophosphamide between 200 mg/m2/day and 2000 mg/m2/day and a dose of fludarabine between 20 mg/m2/day and 900 mg/m2/day.

### Diseases

Genetic Diseases and Diseases with a Genetic and/or Epigenetic Aspect

[0657] The compositions, systems, or components thereof can be used to treat and/or prevent a genetic disease or a disease with a genetic and/or epigenetic aspect. The genes and conditions exemplified herein are not exhaustive. In one embodiment, a method of treating and/or preventing a genetic disease can include administering a composition, system, and/or one or more components thereof to a subject, where the composition, system, and/or one or more components thereof is capable of modifying one or more copies of one or more genes associated with the genetic disease or a disease with a genetic and/or epigenetic aspect in one or more cells of the subject. In one embodiment, modifying one or more copies of one or more genes associated with a genetic disease or a disease with a genetic and/or epigenetic aspect in the subject can eliminate a genetic disease or a symptom thereof in the subject. In one embodiment, modifying one or more copies of one or more genes associated with a genetic disease or a disease with a genetic and/or epigenetic aspect in the subject can decrease the severity of a genetic disease or a symptom thereof in the subject. In one embodiment, the compositions, systems, or components thereof can modify one or more genes or polynucleotides associated with one or more diseases, including genetic diseases and/or those having a genetic aspect and/or epigenetic aspect, including but not limited to, any one or more set forth in Table 4. It will be appreciated that those diseases and associated genes listed herein are non-exhaustive and non-limiting. Further some genes play roles in the development of multiple diseases.

TABLE 4
Exemplary Genetic and Other Diseases and Associated Genes

| | Primary | | |
|---|---|---|---|
| | Tissues or | Additional | |
| | System | Tissues/Systems | |
| Disease Name | Affected | Affected | Genes |
| Achondroplasia | Bone and | | fibroblast growth factor receptor 3 |
| | Muscle | | (FGFR3) |
| Achromatopsia | eye | | CNGA3, CNGB3, GNAT2, PDE6C, |
| | | | PDE6H, ACHM2, ACHM3, |
| Acute Renal Injury | kidney | | NFkappaB, AATF, p85alpha, FAS, |
| | | | Apoptosis cascade elements (e.g. |
| | | | FASR, Caspase 2, 3, 4, 6, 7, 8, 9, 10, |
| | | | AKT, TNF alpha, IGF1, IGF1R, |
| | | | RIPK1), p53 |
| Age Related Macular | eye | | Abcr; CCL2; CC2; CP |
| Degeneration | | | (ceruloplasmin); Timp3; cathepsinD; |
| | | | VLDLR, CCR2 |
| AIDS | Immune System | | KIR3DL1, NKAT3, NKB1, AMB11, |
| | | | KIR3DS1, IFNG, CXCL12, SDF1 |
| Albinism (including | Skin, hair, eyes, | | TYR, OCA2, TYRP1, and SLC45A2, |
| oculocutaneous albinism (types | | | SLC24A5 and C10orf11 |
| 1-7) and ocular albinism) | | | |
| Alkaptonuria | Metabolism of | Tissues/organs | HGD |
| | amino acids | where | |
| | | homogentisic acid | |
| | | accumulates, | |
| | | particularly | |
| | | cartilage (joints), | |
| | | heart valves, | |
| | | kidneys | |
| alpha-1 antitrypsin deficiency | Lung | Liver, skin, | SERPINA1, those set forth in |
| (AATD or A1AD) | | vascular system, | WO2017165862, PiZ allele |
| | | kidneys, GI | |
| ALS | CNS | | SOD1; ALS2; ALS3; ALS5; |
| | | | ALS7; STEX; FUS; TARDBP; VEGF |
| | | | (VEGF-a; |
| | | | VEGF-b; VEGF-c); DPP6; NEFH, |
| | | | PTGS1, SLC1A2, TNFRSF10B, |
| | | | PRPH, HSP90AA1, CRIA2, IFNG, |
| | | | AMPA2 S100B, FGF2, AOX1, CS, |
| | | | TXN, RAPHJ1, MAP3K5, NBEAL1, |
| | | | GPX1, ICA1L, RAC1, MAPT, |
| | | | ITPR2, ALS2CR4, GLS, ALS2CR8, |
| | | | CNTFR, ALS2CR11, FOLH1, |
| | | | FAM117B, P4HB, CNTF, SQSTM1, |
| | | | STRADB, NAIP, NLR, YWHAQ, |
| | | | SLC33A1, TRAK2, SCA1, NIF3L1, |
| | | | NIF3, PARD3B, COX8A, CDK15, |
| | | | HECW1, HECT, C2, WW 15, NOS1, |
| | | | MET, SOD2, HSPB1, NEFL, CTSB, |
| | | | ANG, HSPA8, RNase A, VAPB, |
| | | | VAMP, SNCA, alpha HGF, CAT, |
| | | | ACTB, NEFM, TH, BCL2, FAS, |
| | | | CASP3, CLU, SMN1, G6PD, BAX, |
| | | | HSF1, RNF19A, JUN, ALS2CR12, |
| | | | HSPA5, MAPK14, APEX1, |
| | | | TXNRD1, NOS2, TIMP1, CASP9, |
| | | | XIAP, GLG1, EPO, VEGFA, ELN, |
| | | | GDNF, NFE2L2, SLC6A3, HSPA4, |
| | | | APOE, PSMB8, DCTN2, TIMP3, |
| | | | KIFAP3, SLC1A1, SMN2, CCNC, |
| | | | STUB1, ALS2, PRDX6, SYP, |
| | | | CABIN1, CASP1, GART, CDK5, |
| | | | ATXN3, RTN4, C1QB, VEGFC, |
| | | | HTT, PARK7, XDH, GFAP, MAP2, |
| | | | CYCS, FCGR3B, CCS, UBL5, |
| | | | MMP9m SLC18A3, TRPM7, |
| | | | HSPB2, AKT1, DEERL1, CCL2, |
| | | | NGRN, GSR, TPPP3, APAF1, |
| | | | BTBD10, GLUD1, CXCR4, S: C1A3, |
| | | | FLT1, PON1, AR, LIF, ERBB3, :GA: S1, |
| | | | CD44, TP53, TLR3, GRIA1, |
| | | | GAPDH, AMPA, GRIK1, DES, |
| | | | CHAT, FLT4, CHMP2B, BAG1, |
| | | | CHRNA4, GSS, BAK1, KDR, |
| | | | GSTP1, OGG1, IL6 |
| Alzheimer's Disease | Brain | | E1; CHIP; UCH; UBB; Tau; LRP; |
| | | | PICALM; CLU; PS1; |
| | | | SORL1; CR1; VLDLR; UBA1; |
| | | | UBA3; CHIP28; AQP1; UCHL1; |
| | | | UCHL3; APP, AAA, CVAP, AD1, |
| | | | APOE, AD2, DCP1, ACE1, MPO, |
| | | | PACIP1, PAXIP1L, PTIP, A2M, |
| | | | BLMH, BMH, PSEN1, AD3, |
| | | | ALAS2, ABCA1, BIN1, BDNF, |
| | | | BTNL8, C1ORF49, CDH4, |
| | | | CHRNB2, CKLFSF2, CLEC4E, |
| | | | CR1L, CSF3R, CST3, CYP2C, |
| | | | DAPK1, ESR1, FCAR, FCGR3B, |
| | | | FFA2, FGA, GAB2, GALP, |
| | | | GAPDHS, GMPB, HP, HTR7, IDE, |
| | | | IF127, IFI6, IFIT2, IL1RN, IL-IRA, |
| | | | IL8RA, IL8RB, JAG1, KCNJ15, |
| | | | LRP6, MAPT, MARK4, |
| | | | MPHOSPH1, MTHFR, NBN, |
| | | | NCSTN, NIACR2, NMNAT3, NTM, |
| | | | ORM1, P2RY13, PBEF1, PCK1, |
| | | | PICALM, PLAU, PLXNC1, PRNP, |
| | | | PSEN1, PSEN2, PTPRA, RALGPS2, |
| | | | RGSL2, SELENBP1, SLC25A37, |
| | | | SORL1, Mitoferrin-1, TF, TFAM, |
| | | | TNF, TNFRSF10C, UBE1C |
| Amyloidosis | | | APOA1, APP, AAA, CVAP, AD1, |
| | | | GSN, FGA, LYZ, TTR, PALB |
| Amyloid neuropathy | | | TTR, PALB |
| Anemia | Blood | | CDAN1, CDA1, RPS19, DBA, |
| | | | PKLR, PK1, NT5C3, UMPH1, PSN1, |
| | | | RHAG, RH50A, NRAMP2, SPTB, |
| | | | ALAS2, ANH1, ASB, ABCB7, |
| | | | ABC7, ASAT |
| Angelman Syndrome | Nervous system, | | UBE3A |
| | brain | | |
| Attention Deficit Hyperactivity | Brain | | PTCHD1 |
| Disorder (ADHD) | | | |
| Autoimmune | Immune system | | TNFRSF6, APT1, FAS, CD95, |
| lymphoproliferative syndrome | | | ALPS1A |
| Autism, Autism spectrum | Brain | | PTCHD1; Mecp2; BZRAP1; |
| disorders (ASDs), including | | | MDGA2; Sema5A; Neurexin 1; |
| Asperger's and a general | | | GLO1, RTT, PPMX, MRX16, RX79, |
| diagnostic category called | | | NLGN3, NLGN4, KIAA1260, |
| Pervasive Developmental | | | AUTSX2, FMR1, FMR2; FXR1; |
| Disorders (PDDs) | | | FXR2; MGLUR5, ATP10C, CDH10, |
| | | | GRM6, MGLUR6, CDH9, CNTN4, |
| | | | NLGN2, CNTNAP2, SEMA5A, |
| | | | DHCR7, NLGN4X, NLGN4Y, DPP6, |
| | | | NLGN5, EN2, NRCAM, MDGA2, |
| | | | NRXN1, FMR2, AFF2, FOXP2, |
| | | | OR4M2, OXTR, FXR1, FXR2, PAH, |
| | | | GABRA1, PTEN, GABRA5, |
| | | | PTPRZ1, GABRB3, GABRG1, |
| | | | HIRIP3, SEZ6L2, HOXA1, |
| | | | SHANK3, IL6, SHBZRAP1, |
| | | | LAMB1, SLC6A4, SERT, MAPK3, |
| | | | TAS2R1, MAZ, TSC1, MDGA2, |
| | | | TSC2, MECP2, UBE3A, WNT2, see |
| | | | also 20110023145 |
| autosomal dominant polycystic | kidney | liver | PKD1, PKD2 |
| kidney disease (ADPKD) - | | | |
| (includes diseases such as von | | | |
| Hippel-Lindau disease and | | | |
| tubreous sclerosis complex | | | |
| disease) | | | |
| Autosomal Recessive Polycystic | kidney | liver | PKDH1 |
| Kidney Disease (ARPKD) | | | |
| Ataxia-Telangiectasia (a.k.a | Nervous system, | various | ATM |
| Louis Bar syndrome) | immune system | | |
| B-Cell Non-Hodgkin | | | BCL7A, BCL7 |
| Lymphoma | | | |
| Bardet-Biedl syndrome | Eye, | Liver, ear, | ARL6, BBS1, BBS2, BBS4, BBS5, |
| | musculoskeletal | gastrointestinal | BBS7, BBS9, BBS10, BBS12, |
| | system, kidney, | system, brain | CEP290, INPP5E, LZTFL1, MKKS, |
| | reproductive | | MKS1, SDCCAG8, TRIM32, TTC8 |
| | organs | | |
| Bare Lymphocyte Syndrome | blood | | TAPBP, TPSN, TAP2, ABCB3, |
| | | | PSF2, RING11, MHC2TA, C2TA, |
| | | | RFX5, RFXAP, RFX5 |
| Bartter's Syndrome (types I, II, | kidney | | SLC12A1 (type I), KCNJ1 (type II), |
| III, IVA and B, and V) | | | CLCNKB (type III), BSND (type IV |
| | | | A), or both the CLCNKA CLCNKB |
| | | | genes (type IV B), CASR (type V). |
| Becker muscular dystrophy | Muscle | | DMD, BMD, MYF6 |
| Best Disease (Vitelliform | eye | | VMD2 |
| Macular Dystrophy type 2) | | | |
| Bleeding Disorders | blood | | TBXA2R, P2RX1, P2X1 |
| Blue Cone Monochromacy | eye | | OPN1LW, OPN1MW, and LCR |
| Breast Cancer | Breast tissue | | BRCA1, BRCA2, COX-2 |
| Bruton's Disease (aka X-linked | Immune system, | | BTK |
| Agammglobulinemia) | specifically B | | |
| | cells | | |
| Cancers (e.g., lymphoma, | Various | | FAS, BID, CTLA4, PDCD1, CBLB, |
| chronic lymphocytic leukemia | | | PTPN6, TRAC, TRBC, those |
| (CLL), B cell acute lymphocytic | | | described in WO2015048577 |
| leukemia (B-ALL), acute | | | |
| lymphoblastic leukemia, acute | | | |
| myeloid leukemia, non- | | | |
| Hodgkin's lymphoma (NHL), | | | |
| diffuse large cell lymphoma | | | |
| (DLCL), multiple myeloma, | | | |
| renal cell carcinoma (RCC), | | | |
| neuroblastoma, colorectal | | | |
| cancer, breast cancer, ovarian | | | |
| cancer, melanoma, sarcoma, | | | |
| prostate cancer, lung cancer, | | | |
| esophageal cancer, | | | |
| hepatocellular carcinoma, | | | |
| pancreatic cancer, astrocytoma, | | | |
| mesothelioma, head and neck | | | |
| cancer, and medulloblastoma | | | |
| Cardiovascular Diseases | heart | Vascular system | IL1B, XDH, TP53, PTGS, MB, IL4, |
| | | | ANGPT1, ABCGu8, CTSK, PTGIR, |
| | | | KCNJ11, INS, CRP, PDGFRB, |
| | | | CCNA2, PDGFB, KCNJ5, KCNN3, |
| | | | CAPN10, ADRA2B, ABCG5, |
| | | | PRDX2, CPAN5, PARP14, MEX3C, |
| | | | ACE, RNF, IL6, TNF, STN, |
| | | | SERPINE1, ALB, ADIPOQ, APOB, |
| | | | APOE, LEP, MTHFR, APOA1, |
| | | | EDN1, NPPB, NOS3, PPARG, |
| | | | PLAT, PTGS2, CETP, AGTR1, |
| | | | HMGCR, IGF1, SELE, REN, |
| | | | PPARA, PON1, KNG1, CCL2, LPL, |
| | | | VWF, F2, ICAM1, TGFB, NPPA, |
| | | | IL10, EPO, SOD1, VCAM1, IFNG, |
| | | | LPA, MPO, ESR1, MAPK, HP, F3, |
| | | | CST3, COG2, MMP9, SERPINC1, |
| | | | F8, HMOX1, APOC3, IL8, PROL1, |
| | | | CBS, NOS2, TLR4, SELP, ABCA1, |
| | | | AGT, LDLR, GPT, VEGFA, NR3C2, |
| | | | IL18, NOS1, NR3C1, FGB, HGF, |
| | | | IL1A, AKT1, LIPC, HSPD1, |
| | | | MAPK14, SPP1, ITGB3, CAT, |
| | | | UTS2, THBD, F10, CP, |
| | | | TNFRSF11B, EGFR, MMP2, PLG, |
| | | | NPY, RHOD, MAPK8, MYC, FN1, |
| | | | CMA1, PLAU, GNB3, ADRB2, |
| | | | SOD2, F5, VDR, ALOX5, HLA- |
| | | | DRB1, PARP1, CD40LG, PON2, |
| | | | AGER, IRS1, PTGS1, ECE1, F7, |
| | | | IRMN, EPHX2, IGFBP1, MAPK10, |
| | | | FAS, ABCB1, JUN, IGFBP3, CD14, |
| | | | PDE5A, AGTR2, CD40, LCAT, |
| | | | CCR5, MMP1, TIMP1, ADM, |
| | | | DYT10, STAT3, MMP3, ELN, |
| | | | USF1, CFH, HSPA4, MMP12, MME, |
| | | | F2R, SELL, CTSB, ANXA5, |
| | | | ADRB1, CYBA, FGA, GGT1, LIPG, |
| | | | HIF1A, CXCR4, PROC, SCARB1, |
| | | | CD79A, PLTP, ADD1, FGG, SAA1, |
| | | | KCNH2, DPP4, NPR1, VTN, |
| | | | KIAA0101, FOS, TLR2, PPIG, |
| | | | IL1R1, AR, CYP1A1, SERPINA1, |
| | | | MTR, RBP4, APOA4, CDKN2A, |
| | | | FGF2, EDNRB, ITGA2, VLA-2, |
| | | | CABIN1, SHBG, HMGB1, |
| | | | HSP90B2P, CYP3A4, GJA1, CAV1, |
| | | | ESR2, LTA, GDF15, BDNF, |
| | | | CYP2D6, NGF, SP1, TGIF1, SRC, |
| | | | EGF, PIK3CG, HLA-A, KCNQ1, |
| | | | CNR1, FBN1, CHKA, BEST1, |
| | | | CTNNB1, IL2, CD36, PRKAB1, |
| | | | TPO, ALDH7A1, CX3CR1, TH, F9, |
| | | | CH1, TF, HFE, IL17A, PTEN, |
| | | | GSTM1, DMD, GATA4, F13A1, |
| | | | TTR, FABP4, PON3, APOC1, INSR, |
| | | | TNFRSF1B, HTR2A, CSF3, |
| | | | CYP2C9, TXN, CYP11B2, PTH, |
| | | | CSF2, KDR, PLA2G2A, THBS1, |
| | | | GCG, RHOA, ALDH2, TCF7L2, |
| | | | NFE2L2, NOTCH1, UGT1A1, |
| | | | IFNA1, PPARD, SIRT1, GNHR1, |
| | | | PAPPA, ARR3, NPPC, AHSP, |
| | | | PTK2, IL 13, MTOR, ITGB2, GSTT1, |
| | | | IL6ST, CPB2, CYP1A2, HNF4A, |
| | | | SLC64A, PLA2G6, TNFSF11, |
| | | | SLC8A1, F2RL1, AKR1A1, |
| | | | ALDH9A1, BGLAP, MTTP, MTRR, |
| | | | SULT1A3, RAGE, C4B, P2RY12, |
| | | | RNLS, CREB1, POMC, RAC1, |
| | | | LMNA, CD59, SCM5A, CYP1B1, |
| | | | MIF, MMP13, TIMP2, CYP19A1, |
| | | | CUP21A2, PTPN22, MYH14, MBL2, |
| | | | SELPLG, AOC3, CTSL1, PCNA, |
| | | | IGF2, ITGB1, CAST, CXCL12, |
| | | | IGHE, KCNE1, TFRC, COL1A1, |
| | | | COL1A2, IL2RB, PLA2G10, |
| | | | ANGPT2, PROCR, NOX4, HAMP, |
| | | | PTPN11, SLCA1, IL2RA, CCL5, |
| | | | IRF1, CF: AR, CA: CA, EIF4E, |
| | | | GSTP1, JAK2, CYP3A5, HSPG2, |
| | | | CCL3, MYD88, VIP, SOAT1, |
| | | | ADRBK1, NR4A2, MMP8, NPR2, |
| | | | GCH1, EPRS, PPARGC1A, F12, |
| | | | PECAM1, CCL4, CERPINA34, |
| | | | CASR, FABP2, TTF2, PROS1, |
| | | | CTF1, SGCB, YME1L1, CAMP, |
| | | | ZC3H12A, AKR1B1, MMP7, AHR, |
| | | | CSF1, HDAC9, CTGF, KCNMA1, |
| | | | UGT1A, PRKCA, COMT, S100B, |
| | | | EGR1, PRL, IL15, DRD4, CAMK2G, |
| | | | SLC22A2, CCL11, PGF, THPO, |
| | | | GP6, TACR1, NTS, HNF1A, SST, |
| | | | KCDN1, LOC646627, TBXAS1, |
| | | | CUP2J2, TBXA2R, ADH1C, |
| | | | ALOX12, AHSG, BHMT, GJA4, |
| | | | SLC25A4, ACLY, ALOX5AP, |
| | | | NUMA1, CYP27B1, CYSLTR2, |
| | | | SOD3, LTC4S, UCN, GHRL, |
| | | | APOC2, CLEC4A, KBTBD10, TNC, |
| | | | TYMS, SHC1, LRP1, SOCS3, |
| | | | ADH1B, KLK3, HSD11B1, |
| | | | VKORC1, SERPINB2, TNS1, |
| | | | RNF19A, EPOR, ITGAM, PITX2, |
| | | | MAPK7, FCGR3A, LEEPR, ENG, |
| | | | GPX1, GOT2, HRH1, NR112, CRH, |
| | | | HTR1A, VDAC1, HPSE, SFTPD, |
| | | | TAP2, RMF123, PTK2Bm NTRK2, |
| | | | IL6R, ACHE, GLP1R, GHR, GSR, |
| | | | NQO1, NR5A1, GJB2, SLC9A1, |
| | | | MAOA, PCSK9, FCGR2A, |
| | | | SERPINF1, EDN3, UCP2, TFAP2A, |
| | | | C4BPA, SERPINF2, TYMP, ALPP, |
| | | | CXCR2, SLC3A3, ABCG2, ADA, |
| | | | JAK3, HSPA1A, FASN, FGF1, F11, |
| | | | ATP7A, CR1, GFPA, ROCK1, |
| | | | MECP2, MYLK, BCHE, LIPE, |
| | | | ADORA1, WRN, CXCR3, CD81, |
| | | | SMAD7, LAMC2, MAP3K5, CHGA, |
| | | | IAPP, RHO, ENPP1, PTHLH, NRG1, |
| | | | VEGFC, ENPEP, CEBPB, NAGLU,. |
| | | | F2RL3, CX3CL1, BDKRB1, |
| | | | ADAMTS13, ELANE, ENPP2, |
| | | | CISH, GAST, MYOC, ATP1A2, |
| | | | NF1, GJB1, MEF2A, VCL, BMPR2, |
| | | | TUBB, CDC42, KRT18, HSF1, |
| | | | MYB, PRKAA2, ROCK2, TFP1, |
| | | | PRKG1, BMP2, CTNND1, CTH, |
| | | | CTSS, VAV2, NPY2R, IGFBP2, |
| | | | CD28, GSTA1, PPIA, APOH, |
| | | | S100A8, IL11, ALOX15, FBLN1, |
| | | | NR1H3, SCD, GIP, CHGB, PRKCB, |
| | | | SRD5A1, HSD11B2, CALCRL, |
| | | | GALNT2, ANGPTL4, KCNN4, |
| | | | PIK3C2A, HBEGF, CYP7A1, HLA- |
| | | | DRB5, BNIP3, GCKR, S100A12, |
| | | | PADI4, HSPA14, CXCR1, H19, |
| | | | KRTAP19-3, IDDM2, RAC2, YRY1, |
| | | | CLOCK, NGFR, DBH, CHRNA4, |
| | | | CACNA1C, PRKAG2, CHAT, |
| | | | PTGDS, NR1H2, TEK, VEGFB, |
| | | | MEF2C, MAPKAPK2, TNFRSF11A, |
| | | | HSPA9, CYSLTR1, MAT1A, |
| | | | OPRL1, IMPA1, CLCN2, DLD, |
| | | | PSMA6, PSMB8, CHI3L1, |
| | | | ALDH1B1, PARP2, STAR, LBP, |
| | | | ABCC6, RGS2, EFNB2, GJB6, |
| | | | APOA2, AMPD1, DYSF, |
| | | | FDFT1, EMD2, CCR6, GJB3, |
| | | | IL1RL1, ENTPD1, BBS4, CELSR2, |
| | | | F11R, RAPGEF3, HYAL1, ZNF259, |
| | | | ATOX1, ATF6, KHK, SAT1, GGH, |
| | | | TIMP4, SLC4A4, PDE2A, PDE3B, |
| | | | FADS1, FADS2, TMSB4X, TXNIP, |
| | | | LIMS1, RHOB, LY96, FOXO1, |
| | | | PNPLA2, TRH, GJC1, S: C17A5, |
| | | | FTO, GJD2, PRSC1, CASP12, |
| | | | GPBAR1, PXK, IL33, TRIB1, PBX4, |
| | | | NUPR1, 15-SEP, CILP2, TERC, |
| | | | GGT2, MTCO1, UOX, AVP |
| Cataract | eye | | CRYAA, CRYA1, CRYBB2, |
| | | | CRYB2, PITX3, BFSP2, CP49, |
| | | | CP47, CRYAA, CRYA1, PAX6, |
| | | | AN2, MGDA, CRYBA1, CRYB1, |
| | | | CRYGC, CRYG3, CCL, LIM2, |
| | | | MP19, CRYGD, CRYG4, BFSP2, |
| | | | CP49, CP47, HSF4, CTM, HSF4, |
| | | | CTM, MIP, AQP0, CRYAB, |
| | | | CRYA2, CTPP2, CRYBB1, CRYGD, |
| | | | CRYG4, CRYBB2, CRYB2, |
| | | | CRYGC, CRYG3, CCL, CRYAA, |
| | | | CRYA1, GJA8, CX50, CAE1, GJA3, |
| | | | CX46, CZP3, CAE3, CCM1, CAM, |
| | | | KRIT1 |
| CDKL-5 Deficiencies or | Brain, CNS | | CDKL5 |
| Mediated Diseases | | | |
| Charcot-Marie-Tooth (CMT) | Nervous system | Muscles | PMP22 (CMT1A and E), MPZ |
| disease (Types 1, 2, 3, 4,) | | (dystrophy) | (CMT1B), LITAF (CMT1C), EGR2 |
| | | | (CMT1D), NEFL (CMT1F), GJB1 |
| | | | (CMT1X), MFN2 (CMT2A), KIF1B |
| | | | (CMT2A2B), RAB7A (CMT2B), |
| | | | TRPV4 (CMT2C), GARS (CMT2D), |
| | | | NEFL (CMT2E), GAPD1 (CMT2K), |
| | | | HSPB8 (CMT2L), DYNC1H1, |
| | | | CMT2O), LRSAM1 (CMT2P), |
| | | | IGHMBP2 (CMT2S), MORC2 |
| | | | (CMT2Z), GDAP1 (CMT4A), |
| | | | MTMR2 or SBF2/MTMR13 |
| | | | (CMT4B), SH3TC2 (CMT4C), |
| | | | NDRG1 (CMT4D), PRX (CMT4F), |
| | | | FIG. 4 (CMT4J), NT-3 |
| Chédiak-Higashi Syndrome | Immune system | Skin, hair, eyes, | LYST |
| | | neurons | |
| Choroidermia | | | CHM, REP1, |
| Chorioretinal atrophy | eye | | PRDM13, RGR, TEAD1 |
| Chronic Granulomatous Disease | Immune system | | CYBA, CYBB, NCF1, NCF2, NCF4 |
| Chronic Mucocutaneous | Immune system | | AIRE, CARD9, CLEC7A IL12B, |
| Candidiasis | | | IL12B1, IL1F, IL17RA, IL17RC, |
| | | | RORC, STAT1, STAT3, TRAF31P2 |
| Cirrhosis | liver | | KRT18, KRT8, CIRH1A, NAIC, |
| | | | TEX292, KIAA1988 |
| Colon cancer (Familial | Gastrointestinal | | FAP: APC HNPCC: MSH2, |
| adenomatous polyposis (FAP) | | | MLH1, PMS2, SH6, PMS1 |
| and hereditary nonpolyposis | | | |
| colon cancer (HNPCC)) | | | |
| Combined Immunodeficiency | Immune System | | IL2RG, SCIDX1, SCIDX, IMD4); |
| | | | HIV-1 (CCL5, SCYA5, D17S136E, |
| | | | TCP228 |
| Cone(-rod) dystrophy | eye | | AIPL1, CRX, GUA1A, GUCY2D, |
| | | | PITPM3, PROM1, PRPH2, RIMS1, |
| | | | SEMA4A, ABCA4, ADAM9, ATF6, |
| | | | C21ORF2, C8ORF37, CACNA2D4, |
| | | | CDHR1, CERKL, CNGA3, CNGB3, |
| | | | CNNM4, CNAT2, IFT81, KCNV2, |
| | | | PDE6C, PDE6H, POC1B, RAX2, |
| | | | RDH5, RPGRIP1, TTLL5, RetCG1, |
| | | | GUCY2E |
| Congenital Stationary Night | eye | | CABP4, CACNA1F, CACNA2D4, |
| Blindness | | | GNAT1, CPR179, GRK1, GRM6, |
| | | | LRIT3, NYX, PDE6B, RDH5, RHO, |
| | | | RLBP1, RPE65, SAG, SLC24A1, |
| | | | TRPM1, |
| Congenital Fructose Intolerance | Metabolism | | ALDOB |
| Cori's Disease (Glycogen | Various- | | AGL |
| Storage Disease Type III) | wherever | | |
| | glycogen | | |
| | accumulates, | | |
| | particularly | | |
| | liver, heart, | | |
| | skeletal muscle | | |
| Corneal clouding and dystrophy | eye | | APOA1, TGFBI, CSD2, CDGG1, |
| | | | CSD, BIGH3, CDG2, TACSTD2, |
| | | | TROP2, M1S1, VSX1, RINX, PPCD, |
| | | | PPD, KTCN, COL8A2, FECD, |
| | | | PPCD2, PIP5K3, CFD |
| Cornea plana congenital | | | KERA, CNA2 |
| Cri du chat Syndrome, also | | | Deletions involving only band 5p15.2 |
| known as 5p syndrome and cat | | | to the entire short arm of chromosome |
| cry syndrome | | | 5, e.g. CTNND2, TERT, |
| Cystic Fibrosis (CF) | Lungs and | Pancreas, liver, | CTFR, ABCC7, CF, MRP7, |
| | respiratory | digestive system, | SCNN1A, those described in |
| | system | reproductive | WO2015157070 |
| | | system, exocrine, | |
| | | glands, | |
| Diabetic nephropathy | kidney | | Gremlin, 12/15- lipoxygenase, |
| | | | TIM44, |
| Dent Disease (Types 1 and 2) | Kidney | | Type 1: CLCN5, Type 2: ORCL |
| Dentatorubro-Pallidoluysian | CNS, brain, | | Atrophin-1 and Atn1 |
| Atrophy (DRPLA) (aka Haw | muscle | | |
| River and Naito-Oyanagi | | | |
| Disease) | | | |
| Down Syndrome | various | | Chromosome 21 trisomy |
| Drug Addiction | Brain | | Prkce; Drd2; Drd4; ABAT; |
| | | | GRIA2; Grm5; Grin1; Htr1b; Grin2a; |
| | | | Drd3; Pdyn; Grial |
| Duane syndrome (Types 1, 2, | eye | | CHN1, indels on chromosomes 4 and |
| and 3, including subgroups A, B | | | 8 |
| and C). Other names for this | | | |
| condition include: Duane's | | | |
| Retraction Syndrome (or DR | | | |
| syndrome), Eye Retraction | | | |
| Syndrome, Retraction | | | |
| Syndrome, Congenital retraction | | | |
| syndrome and Stilling-Turk- | | | |
| Duane Syndrome | | | |
| Duchenne muscular dystrophy | muscle | Cardiovascular, | DMD, BMD, dystrophin gene, intron |
| (DMD) | | respiratory | flanking exon 51 of DMD gene, exon |
| | | | 51 mutations in DMD gene, see also |
| | | | WO2013163628 and US Pat. Pub. |
| | | | 20130145487 |
| Edward's Syndrome | | | Complete or partial trisomy of |
| (Trisomy 18) | | | chromosome 18 |
| Ehlers-Danlos Syndrome (Types | Various | | COL5A1, COL5A2, COL1A1, |
| I-VI) | depending on | | COL3A1, TNXB, PLOD1, COL1A2, |
| | type: including | | FKBP14 and ADAMTS2 |
| | musculoskeletal, | | |
| | eye, vasculature, | | |
| | immune, and | | |
| | skin | | |
| Emery-Dreifuss muscular | muscle | | LMNA, LMN1, EMD2, FPLD, |
| dystrophy | | | CMD1A, HGPS, LGMD1B, LMNA, |
| | | | LMN1, EMD2, FPLD, CMD1A |
| Enhanced S-Cone Syndrome | eye | | NR2E3, NRL |
| Fabry's Disease | Various - | | GLA |
| | including skin, | | |
| | eyes, and | | |
| | gastrointestinal | | |
| | system, kidney, | | |
| | heart, brain, | | |
| | nervous system | | |
| Facioscapulohumeral muscular | muscles | | FSHMD1A, FSHD1A, FRG1, |
| dystrophy | | | |
| Factor H and Factor H-like 1 | blood | | HF1, CFH, HUS |
| Factor V Leiden thrombophilia | blood | | Factor V (F5) |
| and Factor V deficiency | | | |
| Factor V and Factor VII | blood | | MCFD2 |
| deficiency | | | |
| Factor VII deficiency | blood | | F7 |
| Factor X deficiency | blood | | F10 |
| Factor XI deficiency | blood | | F11 |
| Factor XII deficiency | blood | | F12, HAF |
| Factor XIIIA deficiency | blood | | F13A1, F13A |
| Factor XIIIB deficiency | blood | | F13B |
| Familial Hypercholestereolemia | Cardiovascular | | APOB, LDLR, PCSK9 |
| | system | | |
| Familial Mediterranean Fever | Various- | Heart, kidney, | MEFV |
| (FMF) also called recurrent | organs/tissues | brain/CNS, | |
| polyserositis or familial | with serous or | reproductive | |
| paroxysmal polyserositis | synovial | organs | |
| | membranes, | | |
| | skin, joints | | |
| Fanconi Anemia | Various - blood | | FANCA, FACA, FA1, FA, FAA, |
| | (anemia), | | FAAP95, FAAP90, FLJ34064, |
| | immune system, | | FANCC, FANCG, RAD51, BRCA1, |
| | cognitive, | | BRCA2, BRIP1, BACH1, FANCJ, |
| | kidneys, eyes, | | FANCB, FANCD1, FANCD2, |
| | musculoskeletal | | FANCD, FAD, FANCE, FACE, |
| | | | FANCF, FANCI, ERCC4, FANCL, |
| | | | FANCM, PALB2, RAD51C, SLX4, |
| | | | UBE2T, FANCB, XRCC9, PHF9, |
| | | | KIAA1596 |
| Fanconi Syndrome Types I | kidneys | | FRTS1, GATM |
| (Childhood onset) and II (Adult | | | |
| Onset) | | | |
| Fragile X syndrome and related | brain | | FMR1, FMR2; FXR1; FXR2; |
| disorders | | | mGLUR5 |
| Fragile XE Mental Retardation | Brain, nervous | | FMR1 |
| (aka Martin Bell syndrome) | system | | |
| Friedreich Ataxia (FRDA) | Brain, nervous | heart | FXN/X25 |
| | system | | |
| Fuchs endothelial corneal | Eye | | TCF4; COL8A2 |
| dystrophy | | | |
| Galactosemia | Carbohydrate | Various-where | GALT, GALK1, and GALE |
| | metabolism | galactose | |
| | disorder | accumulates - | |
| | | liver, brain, eyes | |
| Gastrointestinal Epithelial | | | CISH |
| Cancer, GI cancer | | | |
| Gaucher Disease (Types 1, 2, | Fat metabolism | Various-liver, | GBA |
| and 3, as well as other unusual | disorder | spleen, blood, | |
| forms that may not fit into these | | CNS, skeletal | |
| types) | | system | |
| Griscelli syndrome | | | |
| Glaucoma | eye | | MYOC, TIGR, GLC1A, JOAG, |
| | | | GPOA, OPTN, GLC1E, FIP2, HYPL, |
| | | | NRP, CYP1B1, GLC3A, OPA1, |
| | | | NTG, NPG, CYP1B1, GLC3A, those |
| | | | described in WO2015153780 |
| Glomerulo sclerosis | kidney | | CC chemokine ligand 2 |
| Glycogen Storage Diseases | Metabolism | | SLC2A2, GLUT2, G6PC, G6PT, |
| Types I-VI -See also Cori's | Diseases | | G6PT1, GAA, LAMP2, LAMPB, |
| Disease, Pompe's Disease, | | | AGL, GDE, GBE1, GYS2, PYGL, |
| McArdle's disease, Hers | | | PFKM, see also Cori's Disease, |
| Disease, and Von Gierke's | | | Pompe's Disease, McArdle's disease, |
| disease | | | Hers Disease, and Von Gierke's |
| | | | disease |
| RBC Glycolytic enzyme | blood | | any mutations in a gene for an |
| deficiency | | | enzyme in the glycolysis pathway |
| | | | including mutations in genes for |
| | | | hexokinases I and II, glucokinase, |
| | | | phosphoglucose isomerase, |
| | | | phosphofructokinase, aldolase Bm |
| | | | triosephosphate isomerease, |
| | | | glyceraldehydee-3-phosphate |
| | | | dehydrogenase, |
| | | | phosphoglycerokinase, |
| | | | phosphoglycerate mutase, enolase I, |
| | | | pyruvate kinase |
| Hartnup's disease | Malabsorption | Various- brain, | SLC6A19 |
| | disease | gastrointestinal, | |
| | | skin, | |
| Hearing Loss | ear | | NOX3, Hes5, BDNF, |
| Hemochromatosis (HH) | Iron absorption | Various-wherever | HFE and H63D |
| | regulation | iron accumulates, | |
| | disease | liver, heart, | |
| | | pancreas, joints, | |
| | | pituitary gland | |
| Hemophagocytic | blood | | PRF1, HPLH2, UNC13D, MUNC13- |
| lymphohistiocytosis disorders | | | 4, HPLH3, HLH3, FHL3 |
| Hemorrhagic disorders | blood | | PI, ATT, F5 |
| Hers disease (Glycogen storage | liver | muscle | PYGL |
| disease Type VI) | | | |
| Hereditary angioedema (HAE) | | | kalikrein B1 |
| Hereditary Hemorrhagic | Skin and | | ACVRL1, ENG and SMAD4 |
| Telangiectasia (Osler-Weber- | mucous | | |
| Rendu Syndrome) | membranes | | |
| Hereditary Spherocytosis | blood | | NK1, EPB42, SLC4A1, SPTA1, and |
| | | | SPTB |
| Hereditary Persistence of Fetal | blood | | HBG1, HBG2, BCL11A, promoter |
| Hemoglobin | | | region of HBG 1 and/or 2 (in the |
| | | | CCAAT box) |
| Hemophilia (hemophilia A | blood | | A: FVIII, F8C, HEMA |
| (Classic) a B (aka Christmas | | | B: FVIX, HEMB |
| disease) and C) | | | C: F9, F11 |
| Hepatic adenoma | liver | | TCF1, HNF1A, MODY3 |
| Hepatic failure, early onset, and | liver | | SCOD1, SCO1 |
| neurologic disorder | | | |
| Hepatic lipase deficiency | liver | | LIPC |
| Hepatoblastoma, cancer and | liver | | CTNNB1, PDGFRL, PDGRL, |
| carcinomas | | | PRLTS, AXIN1, AXIN, CTNNB1, |
| | | | TP53, P53, LFS1, IGF2R, MPRI, |
| | | | MET, CASP8, MCH5 |
| Hermansky-Pudlak syndrome | Skin, eyes, | | HPS1, HPS3, HPS4, HPS5, HPS6, |
| | blood, lung, | | HPS7, DTNBP1, BLOC1, BLOC1S2, |
| | kidneys, | | BLOC3 |
| | intestine | | |
| HIV susceptibility or infection | Immune system | | IL10, CSIF, CMKBR2, CCR2, |
| | | | CMKBR5, CCCKR5 (CCR5), those |
| | | | in WO2015148670A1 |
| Holoprosencephaly (HPE) | brain | | ACVRL1, ENG, SMAD4 |
| (Alobar, Semilobar, and Lobar) | | | |
| Homocystinuria | Metabolic | Various- | CBS, MTHFR, MTR, MTRR, and |
| | disease | connective tissue, | MMADHC |
| | | muscles, CNS, | |
| | | cardiovascular | |
| | | system | |
| HPV | | | HPV16 and HPV18 E6/E7 |
| HSV1, HSV2, and related | eye | | HSV1 genes (immediate early and |
| keratitis | | | late HSV-1 genes (UL1, 1.5, 5, 6, 8, |
| | | | 9, 12, 15, 16, 18, 19, 22, 23, 26, 26.5, |
| | | | 27, 28, 29, 30, 31, 32, 33, 34, 35, 36, |
| | | | 37, 38, 42, 48, 49.5, 50, 52, 54, S6, |
| | | | RL2, RS1, those described in |
| | | | WO2015153789, WO2015153791 |
| Hunter's Syndrome (aka | Lysosomal | Various- liver, | IDS |
| Mucopolysaccharidosis type II) | storage disease | spleen, eye, joint, | |
| | | heart, brain, | |
| | | skeletal | |
| Huntington's disease (HD) and | Brain, nervous | | HD, HTT, IT15, PRNP, PRIP, JPH3, |
| HD-like disorders | system | | JP3, HDL2, TBP, SCA17, PRKCE; |
| | | | IGF1; EP300; RCOR1; PRKCZ; |
| | | | HDAC4; and TGM2, and those |
| | | | described in WO2013130824, |
| | | | WO2015089354 |
| Hurler's Syndrome (aka | Lysosomal | Various- liver, | IDUA, α-L-iduronidase |
| mucopolysaccharidosis type I H, | storage disease | spleen, eye, joint, | |
| MPS IH) | | heart, brain, | |
| | | skeletal | |
| Hurler-Scheie syndrome (aka | Lysosomal | Various- liver, | IDUA, α-L-iduronidase |
| mucopolysaccharidosis type I H- | storage disease | spleen, eye, joint, | |
| S, MPS I H-S) | | heart, brain, | |
| | | skeletal | |
| hyaluronidase deficiency (aka | Soft and | | HYAL1 |
| MPS IX) | connective | | |
| | tissues | | |
| Hyper IgM syndrome | Immune system | | CD40L |
| Hyper- tension caused renal | kidney | | Mineral corticoid receptor |
| damage | | | |
| Immunodeficiencies | Immune System | | CD3E, CD3G, AICDA, AID, |
| | | | HIGM2, TNFRSF5, CD40, UNG, |
| | | | DGU, HIGM4, TNFSF5, CD40LG, |
| | | | HIGM1, IGM, FOXP3, IPEX, AIID, |
| | | | XPID, PIDX, TNFRSF14B, TACI |
| Inborn errors of metabolism: | Metabolism | Various organs | See also: Carbohydrate metabolism |
| including urea cycle disorders, | diseases, liver | and cells | disorders (e.g. galactosemia), Amino |
| organic acidemias), fatty acid | | | acid Metabolism disorders (e.g. |
| oxidation defects, amino | | | phenylketonuria), Fatty acid |
| acidopathies, carbohydrate | | | metabolism (e.g. MCAD deficiency), |
| disorders, mitochondrial | | | Urea Cycle disorders (e.g. |
| disorders | | | Citrullinemia), Organic acidemias |
| | | | (e.g. Maple Syrup Urine disease), |
| | | | Mitochondrial disorders (e.g. |
| | | | MELAS), peroxisomal disorders (e.g. |
| | | | Zellweger syndrome) |
| Inflammation | Various | | IL-10; IL-1 (IL-la; IL-1b); IL-13; IL- |
| | | | 17 (IL-17a (CTLA8); IL- |
| | | | 17b; IL-17c; IL-17d; IL-17f); II-23; |
| | | | Cx3cr1; ptpn22; TNFa; |
| | | | NOD2/CARD15 for IBD; IL-6; IL-12 |
| | | | (IL-12a; IL-12b); |
| | | | CTLA4; Cx3cl1 |
| Inflammatory Bowel Diseases | Gastrointestinal | Joints, skin | NOD2, IRGM, LRRK2, ATG5, |
| (e.g. Ulcerative Colitis and | | | ATG16L1, IRGM, GATM, ECM1, |
| Chron's Disease) | | | CDH1, LAMB1, HNF4A, GNA12, |
| | | | IL10, CARD9/15. CCR6, IL2RA, |
| | | | MST1, TNFSF15, REL, STAT3, |
| | | | IL23R, IL12B, FUT2 |
| Interstitial renal fibrosis | kidney | | TGF-β type II receptor |
| Job's Syndrome (aka Hyper IgE | Immune System | | STAT3, DOCK8 |
| Syndrome) | | | |
| Juvenile Retinoschisis | eye | | RS1, XLRS1 |
| Kabuki Syndrome 1 | | | MLL4, KMT2D |
| Kennedy Disease (aka | Muscles, brain, | | SBMA/SMAX1/AR |
| Spinobulbar Muscular Atrophy) | nervous system | | |
| Klinefelter syndrome | Various- | | Extra X chromosome in males |
| | particularly | | |
| | those involved | | |
| | in development | | |
| | of male | | |
| | characteristics | | |
| Lafora Disease | Brain, CNS | | EMP2A and EMP2B |
| Leber Congenital Amaurosis | eye | | CRB1, RP12, CORD2, CRD, CRX, |
| | | | IMPDH1, OTX2, AIPL1, CABP4, |
| | | | CCT2, CEP290, CLUAP1, CRB1, |
| | | | CRX, DTHD1, GDF6, GUCY2D, |
| | | | IFT140, IQCB1, KCNJ13, LCA5, |
| | | | LRAT, NMNAT1, PRPH2, RD3, |
| | | | RDH12, RPE65, RP20, RPGRIP1, |
| | | | SPATA7, TULP1, LCA1, LCA4, |
| | | | GUC2D, CORD6, LCA3, |
| Lesch-Nyhan Syndrome | Metabolism | Various - joints, | HPRT1 |
| | disease | cognitive, brain, | |
| | | nervous system | |
| Leukocyte deficiencies and | blood | | ITGB2, CD18, LCAMB, LAD, |
| disorders | | | EIF2B1, EIF2BA, EIF2B2, EIF2B3, |
| | | | EIF2B5, LVWM, CACH, CLE, |
| | | | EIF2B4 |
| Leukemia | Blood | | TAL1, TCL5, SCL, TAL2, FLT3, |
| | | | NBS1, NBS, ZNFN1A1, IK1, LYF1, |
| | | | HOXD4, HOX4B, BCR, CML, PHL, |
| | | | ALL, ARNT, KRAS2, RASK2, |
| | | | GMPS, AF10, ARHGEF12, LARG, |
| | | | KIAA0382, CALM, CLTH, CEBPA, |
| | | | CEBP, CHIC2, BTL, FLT3, KIT, |
| | | | PBT, LPP, NPM1, NUP214, D9S46E, |
| | | | CAN, CAIN, RUNX1, CBFA2, |
| | | | AML1, WHSC1L1, NSD3, FLT3, |
| | | | AF1Q, NPM1, NUMA1, ZNF145, |
| | | | PLZF, PML, MYL, STAT5B, AF10, |
| | | | CALM, CLTH, ARL11, ARLTS1, |
| | | | P2RX7, P2X7, BCR, CML, PHL, |
| | | | ALL, GRAF, NF1, VRNF, WSS, |
| | | | NFNS, PTPN11, PTP2C, SHP2, NS1, |
| | | | BCL2, CCND1, PRAD1, BCL1, |
| | | | TCRA, GATA1, GF1, ERYF1, |
| | | | NFE1, ABL1, NQO1, DIA4, |
| | | | NMOR1, NUP214, D9S46E, CAN, |
| | | | CAIN |
| Limb-girdle muscular dystrophy | muscle | | LGMD |
| diseases | | | |
| Lowe syndrome | brain, eyes, | | OCRL |
| | kidneys | | |
| Lupus glomerulo- nephritis | kidney | | MAPK1 |
| Machado- | Brain, CNS, | | ATX3 |
| Joseph's Disease (also known as | muscle | | |
| Spinocerebellar ataxia Type 3) | | | |
| Macular degeneration | eye | | ABC4, CBC1, CHM1, APOE, |
| | | | C1QTNF5, C2, C3, CCL2, CCR2, |
| | | | CD36, CFB, CFH, CFHR1, CFHR3, |
| | | | CNGB3, CP, CRP, CST3, CTSD, |
| | | | CX3CR1, ELOVL4, ERCC6, |
| | | | FBLN5, FBLN6, FSCN2, HMCN1, |
| | | | HTRA1, IL6, IL8, PLEKHA1, |
| | | | PROM1, PRPH2, RPGR, |
| | | | SERPING1, TCOF1, TIMP3, TLR3 |
| Macular Dystrophy | eye | | BEST1, C1QTNF5, CTNNA1, |
| | | | EFEMP1, ELOVL4, FSCN2, |
| | | | GUCA1B, HMCN1, IMPG1, OTX2, |
| | | | PRDM13, PROM1, PRPH2, RP1L1, |
| | | | TIMP3, ABCA4, CFH, DRAM2, |
| | | | IMG1, MFSD8, ADMD, STGD2, |
| | | | STGD3, RDS, RP7, PRPH, AVMD, |
| | | | AOFMD, VMD2 |
| Malattia Leventinesse | eye | | EFEMP1, FBLN3 |
| Maple Syrup Urine Disease | Metabolism | | BCKDHA, BCKDHB, and DBT |
| | disease | | |
| Marfan syndrome | Connective | Musculoskeletal | FBN1 |
| | tissue | | |
| Maroteaux-Lamy Syndrome | Musculoskeletal | Liver, spleen | ARSB |
| (aka MPS VI) | system, nervous | | |
| | system | | |
| McArdle's Disease (Glycogen | Glycogen | muscle | PYGM |
| Storage Disease Type V) | storage disease | | |
| Medullary cystic kidney disease | kidney | | UMOD, HNFJ, FJHN, MCKD2, |
| | | | ADMCKD2 |
| Metachromatic leukodystrophy | Lysosomal | Nervous system | ARSA |
| | storage disease | | |
| Methylmalonic acidemia | Metabolism | | MMAA, MMAB, MUT, MMACHC, |
| (MMA) | disease | | MMADHC, LMBRD1 |
| Morquio Syndrome (aka MPS | Connective | heart | GALNS |
| IV A and B) | tissue, skin, | | |
| | bone, eyes | | |
| Mucopolysaccharidosis diseases | Lysosomal | | See also Hurler/Scheie syndrome, |
| (Types I H/S, I H, II, III A B and | storage disease - | | Hurler disease, Sanfillipo syndrome, |
| C, I S, IVA and B, IX, VII, and | affects various | | Scheie syndrome, Morquio syndrome, |
| VI) | organs/tissues | | hyaluronidase deficiency, Sly |
| | | | syndrome, and Maroteaux-Lamy |
| | | | syndrome |
| Muscular Atrophy | muscle | | VAPB, VAPC, ALS8, SMN1, SMA1, |
| | | | SMA2, SMA3, SMA4, BSCL2, |
| | | | SPG17, GARS, SMAD1, CMT2D, |
| | | | HEXB, IGHMBP2, SMUBP2, |
| | | | CATF1, SMARD1 |
| Muscular dystrophy | muscle | | FKRP, MDC1C, LGMD2I, LAMA2, |
| | | | LAMM, LARGE, KIAA0609, |
| | | | MDC1D, FCMD, TTID, MYOT, |
| | | | CAPN3, CANP3, DYSF, LGMD2B, |
| | | | SGCG, LGMD2C, DMDA1, SCG3, |
| | | | SGCA, ADL, DAG2, LGMD2D, |
| | | | DMDA2, SGCB, LGMD2E, SGCD, |
| | | | SGD, LGMD2F, CMD IL, TCAP, |
| | | | LGMD2G, CMD1N, TRIM32, |
| | | | HT2A, LGMD2H, FKRP, MDC1C, |
| | | | LGMD2I, TTN, CMD1G, TMD, |
| | | | LGMD2J, POMT1, CAV3, |
| | | | LGMD1C, SEPN1, SELN, RSMD1, |
| | | | PLEC1, PLTN, EBS1 |
| Myotonic dystrophy (Type 1 and | Muscles | Eyes, heart, | CNBP (Type 2) and DMPK (Type 1) |
| Type 2) | | endocrine | |
| Neoplasia | | | PTEN; ATM; ATR; EGFR; ERBB2; |
| | | | ERBB3; ERBB4; |
| | | | Notch1; Notch2; Notch3; Notch4; |
| | | | AKT; AKT2; AKT3; HIF; |
| | | | HIF1a; HIF3a; Met; HRG; Bcl2; |
| | | | PPAR alpha; PPAR |
| | | | gamma; WT1 (Wilms Tumor); FGF |
| | | | Receptor Family |
| | | | members (5 members: 1, 2, 3, 4, 5); |
| | | | CDKN2a; APC; RB |
| | | | (retinoblastoma); MEN1; VHL; |
| | | | BRCA1; BRCA2; AR |
| | | | (Androgen Receptor); TSG101; IGF; |
| | | | IGF Receptor; Igf1 (4 |
| | | | variants); Igf2 (3 variants); Igf 1 |
| | | | Receptor; Igf 2 Receptor; |
| | | | Bax; Bcl2; caspases family (9 |
| | | | members: |
| | | | 1, 2, 3, 4, 6, 7, 8, 9, 12); Kras; Apc |
| Neurofibromatosis (NF) (NF1, | brain, spinal | | NF1, NF2 |
| formerly Recklinghausen's NF, | cord, nerves, | | |
| and NF2) | and skin | | |
| Niemann-Pick Lipidosis (Types | Lysosomal | Various- where | Types A and B: SMPD1; Type C: |
| A, B, and C) | Storage Disease | sphingomyelin | NPC1 or NPC2 |
| | | accumulates, | |
| | | particularly | |
| | | spleen, liver, | |
| | | blood, CNS | |
| Noonan Syndrome | Various - | | PTPN11, SOS1, RAF1 and KRAS |
| | musculoskeletal, | | |
| | heart, eyes, | | |
| | reproductive | | |
| | organs, blood | | |
| Norrie Disease or X-linked | eye | | NDP |
| Familial Exudative | | | |
| Vitreoretinopathy | | | |
| North Carolina Macular | eye | | MCDR1 |
| Dystrophy | | | |
| Osteogenesis imperfecta (OI) | bones, | | COL1A1, COL1A2, CRTAP, P3H |
| (Types I, II, III, IV, V, VI, VII) | musculoskeletal | | |
| Osteopetrosis | bones | | LRP5, BMND1, LRP7, LR3, OPPG, |
| | | | VBCH2, CLCN7, CLC7, OPTA2, |
| | | | OSTM1, GL, TCIRG1, TIRC7, |
| | | | OC116, OPTB1 |
| Patau's Syndrome | Brain, heart, | | Additional copy of chromosome 13 |
| (Trisomy 13) | skeletal system | | |
| Parkinson's disease (PD) | Brain, nervous | | SNCA (PARK1), UCHL1 (PARK 5), |
| | system | | and LRRK2 (PARK8), (PARK3), |
| | | | PARK2, PARK4, PARK7 (PARK7), |
| | | | PINK1 (PARK6); x-Synuclein, DJ-1, |
| | | | Parkin, NR4A2, NURR1, NOT, |
| | | | TINUR, SNCAIP, TBP, SCA17, |
| | | | NCAP, PRKN, PDJ, DBH, NDUFV2 |
| Pattern Dystrophy of the RPE | eye | | RDS/peripherin |
| Phenylketonuria (PKU) | Metabolism | Various due to | PAH, PKU1, QDPR, DHPR, PTS |
| | disorder | build-up of | |
| | | phenylalanine, | |
| | | phenyl ketones in | |
| | | tissues and CNS | |
| Polycystic kidney and hepatic | Kidney, liver | | FCYT, PKHD1, ARPKD, PKD1, |
| disease | | | PKD2, PKD4, PKDTS, PRKCSH, |
| | | | G19P1, PCLD, SEC63 |
| Pompe's Disease | Glycogen | Various - heart, | GAA |
| | storage disease | liver, spleen | |
| Porphyria (actually refers to a | Various- | | ALAD, ALAS2, CPOX, FECH, |
| group of different diseases all | wherever heme | | HMBS, PPOX, UROD, or UROS |
| having a specific heme | precursors | | |
| production process abnormality) | accumulate | | |
| posterior polymorphous corneal | eyes | | TCF4; COL8A2 |
| dystrophy | | | |
| Primary Hyperoxaluria (e.g. type | Various - eyes, | | LDHA (lactate dehydrogenase A) and |
| 1) | heart, kidneys, | | hydroxyacid oxidase 1 (HAO1) |
| | skeletal system | | |
| Primary Open Angle Glaucoma | eyes | | MYOC |
| (POAG) | | | |
| Primary sclerosing cholangitis | Liver, | | TCF4; COL8A2 |
| | gallbladder | | |
| Progeria (also called | All | | LMNA |
| Hutchinson-Gilford progeria | | | |
| syndrome) | | | |
| Prader-Willi Syndrome | Musculoskeletal | | Deletion of region of short arm of |
| | system, brain, | | chromosome 15, including UBE3A |
| | reproductive | | |
| | and endocrine | | |
| | system | | |
| Prostate Cancer | prostate | | HOXB13, MSMB, GPRC6A, TP53 |
| Pyruvate Dehydrogenase | Brain, nervous | | PDHA1 |
| Deficiency | system | | |
| Kidney/Renal carcinoma | kidney | | RLIP76, VEGF |
| Rett Syndrome | Brain | | MECP2, RTT, PPMX, MRX16, |
| | | | MRX79, CDKL5, STK9, MECP2, |
| | | | RTT, PPMX, MRX16, MRX79, x- |
| | | | Synuclein, DJ-1 |
| Retinitis pigmentosa (RP) | eye | | ADIPOR1, ABCA4, AGBL5, |
| | | | ARHGEF18, ARL2BP, ARL3, |
| | | | ARL6, BEST1, BBS1, BBS2, |
| | | | C2ORF71, C8ORF37, CA4, CERKL, |
| | | | CLRN1, CNGA1, CMGB1, CRB1, |
| | | | CRX, CYP4V2, DHDDS, DHX38, |
| | | | EMC1, EYS, FAM161A, FSCN2, |
| | | | GPR125, GUCA1B, HK1, HPRPF3, |
| | | | HGSNAT, IDH3B, IMPDH1, |
| | | | IMPG2, IFT140, IFT172, KLHL7, |
| | | | KIAA1549, KIZ, LRAT, MAK, |
| | | | MERTK, MVK, NEK2, NUROD1, |
| | | | NR2E3, NRL, OFD1, PDE6A, |
| | | | PDE6B, PDE6G, POMGNT1, PRCD, |
| | | | PROM1, PRPF3, PRPF4, PRPF6, |
| | | | PRPF8, PRPF31, PRPH2, RPB3, |
| | | | RDH12, REEP6, RP39, RGR, RHO, |
| | | | RLBP1, ROM1, RP1, RP1L1, RPY, |
| | | | RP2, RP9, RPE65, RPGR, SAMD11, |
| | | | SAG, SEMA4A, SLC7A14, |
| | | | SNRNP200, SPP2, SPATA7, |
| | | | TRNT1, TOPORS, TTC8, TULP1, |
| | | | USH2A, ZFN408, ZNF513, see also |
| | | | 20120204282 |
| Scheie syndrome (also known as | Various- liver, | | IDUA, α-L-iduronidase |
| mucopolysaccharidosis type I | spleen, eye, | | |
| S(MPS I-S)) | joint, heart, | | |
| | brain, skeletal | | |
| Schizophrenia | Brain | | Neuregulin1 (Nrg1); Erb4 (receptor |
| | | | for Neuregulin); |
| | | | Complexin1 (Cplx1); Tph1 |
| | | | Tryptophan hydroxylase; Tph2 |
| | | | Tryptophan hydroxylase 2; Neurexin |
| | | | 1; GSK3; GSK3a; |
| | | | GSK3b; 5-HTT (Slc6a4); COMT; |
| | | | DRD (Drd1a); SLC6A3; DAOA; |
| | | | DTNBP1; Dao (Dao1); TCF4; |
| | | | COL8A2 |
| Secretase Related Disorders | Various | | APH-1 (alpha and beta); PSEN1; |
| | | | NCSTN; PEN-2; Nos1, Parp1, Nat1, |
| | | | Nat2, CTSB, APP, APH1B, PSEN2, |
| | | | PSENEN, BACE1, ITM2B, CTSD, |
| | | | NOTCH1, TNF, INS, DYT10, |
| | | | ADAM17, APOE, ACE, STN, TP53, |
| | | | IL6, NGFR, IL1B, ACHE, CTNNB1, |
| | | | IGF1, IFNG, NRG1, CASP3, |
| | | | MAPK1, CDH1, APBB1, HMGCR, |
| | | | CREB1, PTGS2, HES1, CAT, |
| | | | TGFB1, ENO2, ERBB4, TRAPPC10, |
| | | | MAOB, NGF, MMP12, JAG1, |
| | | | CD40LG, PPARG, FGF2, LRP1, |
| | | | NOTCH4, MAPK8, PREP, |
| | | | NOTCH3, PRNP, CTSG, EGF, REN, |
| | | | CD44, SELP, GHR, ADCYAP1, |
| | | | INSR, GFAP, MMP3, MAPK10, |
| | | | SP1, MYC, CTSE, PPARA, JUN, |
| | | | TIMP1, IL5, IL1A, MMP9, HTR4, |
| | | | HSPG2, KRAS, CYCS, SMG1, |
| | | | IL1R1, PROK1, MAPK3, NTRK1, |
| | | | IL13, MME, TKT, CXCR2, CHRM1, |
| | | | ATXN1, PAWR, NOTCJ2, M6PR, |
| | | | CYP46A1, CSNK1D, MAPK14, |
| | | | PRG2, PRKCA, L1 CAM, CD40, |
| | | | NR112, JAG2, CTNND1, CMA1, |
| | | | SORT1, DLK1, THEM4, JUP, CD46, |
| | | | CCL11, CAV3, RNASE3, HSPA8, |
| | | | CASP9, CYP3A4, CCR3, TFAP2A, |
| | | | SCP2, CDK4, JOF1A, TCF7L2, |
| | | | B3GALTL, MDM2, RELA, CASP7, |
| | | | IDE, FANP4, CASK, ADCYAP1R1, |
| | | | ATF4, PDGFA, C21ORF33, SCG5, |
| | | | RMF123, NKFB1, ERBB2, CAV1, |
| | | | MMP7, TGFA, RXRA, STX1A, |
| | | | PSMC4, P2RY2, TNFRSF21, DLG1, |
| | | | NUMBL, SPN, PLSCR1, UBQLN2, |
| | | | UBQLN1, PCSK7, SPON1, SILV, |
| | | | QPCT, HESS, GCC1 |
| Selective IgA Deficiency | Immune system | | Type 1: MSH5; Type 2: TNFRSF13B |
| Severe Combined | Immune system | | JAK3, JAKL, DCLRE1C, ARTEMIS, |
| Immunodeficiency (SCID) and | | | SCIDA, RAG1, RAG2, ADA, |
| SCID-X1, and ADA-SCID | | | PTPRC, CD45, LCA, IL7R, CD3D, |
| | | | T3D, IL2RG, SCIDX1, SCIDX, |
| | | | IMD4, those identified in US Pat. |
| | | | App. Pub. 20110225664, |
| | | | 20110091441, 20100229252, |
| | | | 20090271881 and 20090222937; |
| Sickle cell disease | blood | | HBB, BCL11A, BCL11Ae, cis- |
| | | | regulatory elements of the B-globin |
| | | | locus, HBG 1/2 promoter, HBG distal |
| | | | CCAAT box region between −92 |
| | | | and −130 of the HBG Transcription Start |
| | | | Site, those described in |
| | | | WO2015148863, WO 2013/126794, |
| | | | US Pat. Pub. 20110182867 |
| Sly Syndrome (aka MPS VII) | | | GUSB |
| Spinocerebellar Ataxias (SCA | | | ATXN1, ATXN2, ATX3 |
| types 1, 2, 3, 6, 7, 8, 12 and 17) | | | |
| Sorsby Fundus Dystrophy | eye | | TIMP3 |
| Stargardt disease | eye | | ABCR, ELOVL4, ABCA4, PROM1 |
| Tay-Sachs Disease | Lysosomal | Various - CNS, | HEX-A |
| | Storage disease | brain, eye | |
| Thalassemia (Alpha, Beta, | blood | | HBA1, HBA2 (Alpha), HBB (Beta), |
| Delta) | | | HBB and HBD (delta), LCRB, |
| | | | BCL11A, BCL11Ae, cis-regulatory |
| | | | elements of the B-globin locus, HBG |
| | | | 1/2 promoter, those described in |
| | | | WO2015148860, US Pat. Pub. |
| | | | 20110182867, 2015/148860 |
| Thymic Aplasia (DiGeorge | Immune system, | | deletion of 30 to 40 genes in the |
| Syndrome; 22q11.2 deletion | thymus | | middle of chromosome 22 at |
| syndrome) | | | a location known as 22q11.2, |
| | | | including TBX1, DGCR8 |
| Transthyretin amyloidosis | liver | | TTR (transthyretin) |
| (ATTR) | | | |
| trimethylaminuria | Metabolism | | FMO3 |
| | disease | | |
| Trinucleotide Repeat Disorders | Various | | HTT; SBMA/SMAX1/AR; |
| (generally) | | | FXN/X25 ATX3; |
| | | | ATXN1; ATXN2; |
| | | | DMPK; Atrophin-1 and Atn1 |
| | | | (DRPLA Dx); CBP (Creb-BP - global |
| | | | instability); VLDLR; Atxn7; Atxn10; |
| | | | FEN1, TNRC6A, PABPN1, JPH3, |
| | | | MED15, ATXN1, ATXN3, TBP, |
| | | | CACNA1A, ATXN80S, PPP2R2B, |
| | | | ATXN7, TNRC6B, TNRC6C, |
| | | | CELF3, MAB21L1, MSH2, |
| | | | TMEM185A, SIX5, CNPY3, RAXE, |
| | | | GNB2, RPL14, ATXN8, ISR, TTR, |
| | | | EP400, GIGYF2, OGG1, STC1, |
| | | | CNDP1, C10ORF2, MAML3, DKC1, |
| | | | PAXIP1, CASK, MAPT, SP1, POLG, |
| | | | AFF2, THBS1, TP53, ESR1, |
| | | | CGGBP1, ABT1, KLK3, PRNP, |
| | | | JUN, KCNN3, BAX, FRAXA, |
| | | | KBTBD10, MBNL1, RAD51, |
| | | | NCOA3, ERDA1, TSC1, COMP, |
| | | | GGLC, RRAD, MSH3, DRD2, |
| | | | CD44, CTCF, CCND1, CLSPN, |
| | | | MEF2A, PTPRU, GAPDH, TRIM22, |
| | | | WT1, AHR, GPX1, TPMT, NDP, |
| | | | ARX, TYR, EGR1, UNG, NUMBL, |
| | | | FABP2, EN2, CRYGC, SRP14, |
| | | | CRYGB, PDCD1, HOXA1, |
| | | | ATXN2L, PMS2, GLA, CBL, FTH1, |
| | | | IL12RB2, OTX2, HOXA5, POLG2, |
| | | | DLX2, AHRR, MANF, RMEM158, |
| | | | see also 20110016540 |
| Turner's Syndrome (XO) | Various - | | Monosomy X |
| | reproductive | | |
| | organs, and sex | | |
| | characteristics, | | |
| | vasculature | | |
| Tuberous Sclerosis | CNS, heart, | | TSC1, TSC2 |
| | kidneys | | |
| Usher syndrome (Types I, II, and | Ears, eyes | | ABHD12, CDH23, CIB2, CLRN1, |
| III) | | | DFNB31, GPR98, HARS, MYO7A, |
| | | | PCDH15, USH1C, USH1G, USH2A, |
| | | | USH11A, those described in |
| | | | WO2015134812A1 |
| Velocardiofacial syndrome (aka | Various - | | Many genes are deleted, COM, |
| 22q11.2 deletion syndrome, | skeletal, heart, | | TBX1, and other are associated with |
| DiGeorge syndrome, | kidney, immune | | symptoms |
| conotruncal anomaly face | system, brain | | |
| syndrome (CTAF), autosomal | | | |
| dominant Opitz G/BB syndrome | | | |
| or Cayler cardiofacial syndrome) | | | |
| Von Gierke's Disease (Glycogen | Glycogen | Various - liver, | G6PC and SLC37A4 |
| Storage Disease type I) | Storage disease | kidney | |
| Von Hippel-Lindau Syndrome | Various - cell | CNS, Kidney, | VHL |
| | growth | Eye, visceral | |
| | regulation | organs | |
| | disorder | | |
| Von Willebrand Disease (Types | blood | | VWF |
| I, II and III) | | | |
| Wilson Disease | Various - | Liver, brains, | ATP7B |
| | Copper Storage | eyes, other tissues | |
| | Disease | where copper | |
| | | builds up | |
| Wiskott-Aldrich Syndrome | Immune System | | WAS |
| Xeroderma Pigmentosum | Skin | Nervous system | POLH |
| XXX Syndrome | Endocrine, brain | | X chromosome trisomy |

[0658] In one embodiment, the compositions, systems, or components thereof can be used treat or prevent a disease in a subject by modifying one or more genes associated with one or more cellular functions, such as any one or more of those in Table 7. In one embodiment, the disease is a genetic disease or disorder. In some of embodiments, the composition, system, or component thereof can modify one or more genes or polynucleotides associated with one or more genetic diseases such as any set forth in Table 5.

TABLE 5
Exemplary Genes controlling Cellular Functions

| CELLULAR FUNCTION | GENES |
|---|---|
| PI3K/AKT Signaling | PRKCE; ITGAM; ITGA5; IRAK1; PRKAA2; EIF2AK2; PTEN; EIF4E; |
| | PRKCZ; GRK6; MAPK1; TSC1; PLK1; AKT2; IKBKB; PIK3CA; CDK8; |
| | CDKN1B; NFKB2; BCL2; PIK3CB; PPP2R1A; MAPK8; BCL2L1; MAPK3; |
| | TSC2; |
| | ITGA1; KRAS; EIF4EBP1; RELA; PRKCD; NOS3; |
| | PRKAA1; MAPK9; CDK2; PPP2CA; PIM1; ITGB7; |
| | YWHAZ; ILK; TP53; RAF1; IKBKG; RELB; DYRK1A; |
| | CDKN1A; ITGB1; MAP2K2; JAK1; AKT1; JAK2; PIK3R1; |
| | CHUK; PDPK1; PPP2R5C; CTNNB1; MAP2K1; NFKB1; |
| | PAK3; ITGB3; CCND1; GSK3A; FRAP1; SFN; ITGA2; |
| | TTK; CSNK1A1; BRAF; GSK3B; AKT3; FOXO1; SGK; |
| | HSP90AA1; RPS6KB1 |
| ERK/MAPK Signaling | PRKCE; ITGAM; ITGA5; HSPB1; IRAK1; PRKAA2; |
| | EIF2AK2; RAC1; RAP1A; TLN1; EIF4E; ELK1; GRK6; |
| | MAPK1; RAC2; PLK1; AKT2; PIK3CA; CDK8; CREB1; |
| | PRKC1; PTK2; FOS; RPS6KA4; PIK3CB; PPP2R1A; |
| | PIK3C3; MAPK8; MAPK3; ITGA1; ETS1; KRAS; MYCN; |
| | EIF4EBP1; PPARG; PRKCD; PRKAA1; MAPK9; SRC; |
| | CDK2; PPP2CA; PIM1; PIK3C2A; ITGB7; YWHAZ; |
| | PPP1CC; KSR1; PXN; RAF1; FYN; DYRK1A; ITGB1; |
| | MAP2K2; PAK4; PIK3R1; STAT3; PPP2R5C; MAP2K1; |
| | PAK3; ITGB3; ESR1; ITGA2; MYC; TTK; CSNK1A1; |
| | CRKL; BRAF; ATF4; PRKCA; SRF; STAT1; SGK |
| Glucocorticoid Receptor | RAC1; TAF4B; EP300; SMAD2; TRAF6; PCAF; ELK1; |
| Signaling | MAPK1; SMAD3; AKT2; IKBKB; NCOR2; UBE21; |
| | PIK3CA; CREB1; FOS; HSPA5; NFKB2; BCL2; |
| | MAP3K14; STAT5B; PIK3CB; PIK3C3; MAPK8; BCL2L1; |
| | MAPK3; TSC22D3; MAPK10; NRIP1; KRAS; MAPK13; |
| | RELA; STAT5A; MAPK9; NOS2A; PBX1; NR3C1; |
| | PIK3C2A; CDKN1C; TRAF2; SERPINE1; NCOA3; |
| | MAPK14; TNF; RAF1; IKBKG; MAP3K7; CREBBP; |
| | CDKN1A; MAP2K2; JAK1; IL8; NCOA2; AKT1; JAK2; |
| | PIK3R1; CHUK; STAT3; MAP2K1; NFKB1; TGFBR1; |
| | ESR1; SMAD4; CEBPB; JUN; AR; AKT3; CCL2; MMP1; |
| | STAT1; IL6; HSP90AA1 |
| Axonal Guidance Signaling | PRKCE; ITGAM; ROCK1; ITGA5; CXCR4; ADAM12; |
| | IGF1; RAC1; RAP1A; EIF4E; PRKCZ; NRP1; NTRK2; |
| | ARHGEF7; SMO; ROCK2; MAPK1; PGF; RAC2; |
| | PTPN11; GNAS; AKT2; PIK3CA; ERBB2; PRKCI; PTK2; |
| | CFL1; GNAQ; PIK3CB; CXCL12; PIK3C3; WNT11; |
| | PRKD1; GNB2L1; ABL1; MAPK3; ITGA1; KRAS; RHOA; |
| | PRKCD; PIK3C2A; ITGB7; GLI2; PXN; VASP; RAF1; |
| | FYN; ITGB1; MAP2K2; PAK4; ADAM17; AKT1; PIK3R1; |
| | GLI1; WNT5A; ADAM10; MAP2K1; PAK3; ITGB3; |
| | CDC42; VEGFA; ITGA2; EPHA8; CRKL; RND1; GSK3B; |
| | AKT3; PRKCA |
| Ephrin Receptor Signaling | PRKCE; ITGAM; ROCK1; ITGA5; CXCR4; IRAK1; |
| Actin Cytoskeleton | PRKAA2; EIF2AK2; RAC1; RAP1A; GRK6; ROCK2; |
| Signaling | MAPK1; PGF; RAC2; PTPN11; GNAS; PLK1; AKT2; |
| | DOK1; CDK8; CREB1; PTK2; CFL1; GNAQ; MAP3K14; |
| | CXCL12; MAPK8; GNB2L1; ABL1; MAPK3; ITGA1; |
| | KRAS; RHOA; PRKCD; PRKAA1; MAPK9; SRC; CDK2; |
| | PIM1; ITGB7; PXN; RAF1; FYN; DYRK1A; ITGB1; |
| | MAP2K2; PAK4; AKT1; JAK2; STAT3; ADAM10; |
| | MAP2K1; PAK3; ITGB3; CDC42; VEGFA; ITGA2; |
| | EPHA8; TTK; CSNK1A1; CRKL; BRAF; PTPN13; ATF4; |
| | AKT3; SGK |
| | ACTN4; PRKCE; ITGAM; ROCK1; ITGA5; IRAK1; |
| | PRKAA2; EIF2AK2; RAC1; INS; ARHGEF7; GRK6; |
| | ROCK2; MAPK1; RAC2; PLK1; AKT2; PIK3CA; CDK8; |
| | PTK2; CFL1; PIK3CB; MYH9; DIAPH1; PIK3C3; MAPK8; |
| | F2R; MAPK3; SLC9A1; ITGA1; KRAS; RHOA; PRKCD; |
| | PRKAA1; MAPK9; CDK2; PIM1; PIK3C2A; ITGB7; |
| | PPP1CC; PXN; VIL2; RAF1; GSN; DYRK1A; ITGB1; |
| | MAP2K2; PAK4; PIP5K1A; PIK3R1; MAP2K1; PAK3; |
| | ITGB3; CDC42; APC; ITGA2; TTK; CSNKIA1; CRKL; |
| | BRAF; VAV3; SGK |
| Huntington's Disease | PRKCE; IGF1; EP300; RCOR1; PRKCZ; HDAC4; TGM2; |
| Signaling | MAPK1; CAPNS1; AKT2; EGFR; NCOR2; SP1; CAPN2; |
| | PIK3CA; HDAC5; CREB1; PRKCI; HSPA5; REST; |
| | GNAQ; PIK3CB; PIK3C3; MAPK8; IGF1R; PRKD1; |
| | GNB2L1; BCL2L1; CAPN1; MAPK3; CASP8; HDAC2; |
| | HDAC7A; PRKCD; HDAC11; MAPK9; HDAC9; PIK3C2A; |
| | HDAC3; TP53; CASP9; CREBBP; AKT1; PIK3R1; |
| | PDPK1; CASP1; APAF1; FRAP1; CASP2; JUN; BAX; |
| | ATF4; AKT3; PRKCA; CLTC; SGK; HDAC6; CASP3 |
| Apoptosis Signaling | PRKCE; ROCK1; BID; IRAK1; PRKAA2; EIF2AK2; BAK1; |
| | BIRC4; GRK6; MAPK1; CAPNS1; PLK1; AKT2; IKBKB; |
| | CAPN2; CDK8; FAS; NFKB2; BCL2; MAP3K14; MAPK8; |
| | BCL2L1; CAPN1; MAPK3; CASP8; KRAS; RELA; |
| | PRKCD; PRKAA1; MAPK9; CDK2; PIM1; TP53; TNF; |
| | RAF1; IKBKG; RELB; CASP9; DYRK1A; MAP2K2; |
| | CHUK; APAF1; MAP2K1; NFKB1; PAK3; LMNA; CASP2; |
| | BIRC2; TTK; CSNK1A1; BRAF; BAX; PRKCA; SGK; |
| | CASP3; BIRC3; PARP1 |
| B Cell Receptor Signaling | RAC1; PTEN; LYN; ELK1; MAPK1; RAC2; PTPN11; |
| | AKT2; IKBKB; PIK3CA; CREB1; SYK; NFKB2; CAMK2A; |
| | MAP3K14; PIK3CB; PIK3C3; MAPK8; BCL2L1; ABL1; |
| | MAPK3; ETS1; KRAS; MAPK13; RELA; PTPN6; MAPK9; |
| | EGR1; PIK3C2A; BTK; MAPK14; RAF1; IKBKG; RELB; |
| | MAP3K7; MAP2K2; AKT1; PIK3R1; CHUK; MAP2K1; |
| | NFKB1; CDC42; GSK3A; FRAP1; BCL6; BCL10; JUN; |
| | GSK3B; ATF4; AKT3; VAV3; RPS6KB1 |
| Leukocyte Extravasation | ACTN4; CD44; PRKCE; ITGAM; ROCK1; CXCR4; CYBA; |
| Signaling | RAC1; RAP1A; PRKCZ; ROCK2; RAC2; PTPN11; |
| | MMP14; PIK3CA; PRKCI; PTK2; PIK3CB; CXCL12; |
| | PIK3C3; MAPK8; PRKD1; ABL1; MAPK10; CYBB; |
| | MAPK13; RHOA; PRKCD; MAPK9; SRC; PIK3C2A; BTK; |
| | MAPK14; NOX1; PXN; VIL2; VASP; ITGB1; MAP2K2; |
| | CTNND1; PIK3R1; CTNNB1; CLDN1; CDC42; F11R; ITK; |
| | CRKL; VAV3; CTTN; PRKCA; MMP1; MMP9 |
| Integrin Signaling | ACTN4; ITGAM; ROCK1; ITGA5; RAC1; PTEN; RAPIA; |
| | TLN1; ARHGEF7; MAPK1; RAC2; CAPNS1; AKT2; |
| | CAPN2; PIK3CA; PTK2; PIK3CB; PIK3C3; MAPK8; |
| | CAV1; CAPN1; ABL1; MAPK3; ITGA1; KRAS; RHOA; |
| | SRC; PIK3C2A; ITGB7; PPP1CC; ILK; PXN; VASP; |
| | RAF1; FYN; ITGB1; MAP2K2; PAK4; AKT1; PIK3R1; |
| | TNK2; MAP2K1; PAK3; ITGB3; CDC42; RND3; ITGA2; |
| | CRKL; BRAF; GSK3B; AKT3 |
| Acute Phase Response | IRAK1; SOD2; MYD88; TRAF6; ELK1; MAPK1; PTPN11; |
| Signaling | AKT2; IKBKB; PIK3CA; FOS; NFKB2; MAP3K14; |
| | PIK3CB; MAPK8; RIPK1; MAPK3; IL6ST; KRAS; |
| | MAPK13; IL6R; RELA; SOCS1; MAPK9; FTL; NR3C1; |
| | TRAF2; SERPINE1; MAPK14; TNF; RAF1; PDK1; |
| | IKBKG; RELB; MAP3K7; MAP2K2; AKT1; JAK2; PIK3R1; |
| | CHUK; STAT3; MAP2K1; NFKB1; FRAP1; CEBPB; JUN; |
| | AKT3; ILIR1; IL6 |
| PTEN Signaling | ITGAM; ITGA5; RAC1; PTEN; PRKCZ; BCL2L11; |
| | MAPK1; RAC2; AKT2; EGFR; IKBKB; CBL; PIK3CA; |
| | CDKNIB; PTK2; NFKB2; BCL2; PIK3CB; BCL2L1; |
| | MAPK3; ITGA1; KRAS; ITGB7; ILK; PDGFRB; INSR; |
| | RAF1; IKBKG; CASP9; CDKN1A; ITGB1; MAP2K2; |
| | AKT1; PIK3R1; CHUK; PDGFRA; PDPK1; MAP2K1; |
| | NFKB1; ITGB3; CDC42; CCND1; GSK3A; ITGA2; |
| | GSK3B; AKT3; FOXO1; CASP3; RPS6KB1 |
| p53 Signaling | PTEN; EP300; BBC3; PCAF; FASN; BRCA1; GADD45A; |
| Aryl Hydrocarbon Receptor | BIRC5; AKT2; PIK3CA; CHEK1; TP53INP1; BCL2; |
| Signaling | PIK3CB; PIK3C3; MAPK8; THBS1; ATR; BCL2L1; E2F1; |
| | PMAIP1; CHEK2; TNFRSF10B; TP73; RB1; HDAC9; |
| | CDK2; PIK3C2A; MAPK14; TP53; LRDD; CDKN1A; |
| | HIPK2; AKT1; PIK3R1; RRM2B; APAF1; CTNNB1; |
| | SIRT1; CCND1; PRKDC; ATM; SFN; CDKN2A; JUN; |
| | SNAI2; GSK3B; BAX; AKT3 |
| | HSPB1; EP300; FASN; TGM2; RXRA; MAPK1; NQO1; |
| | NCOR2; SP1; ARNT; CDKN1B; FOS; CHEK1; |
| | SMARCA4; NFKB2; MAPK8; ALDH1A1; ATR; E2F1; |
| | MAPK3; NRIP1; CHEK2; RELA; TP73; GSTP1; RB1; |
| | SRC; CDK2; AHR; NFE2L2; NCOA3; TP53; TNF; |
| | CDKN1A; NCOA2; APAF1; NFKB1; CCND1; ATM; ESR1; |
| | CDKN2A; MYC; JUN; ESR2; BAX; IL6; CYP1B1; |
| | HSP90AA1 |
| Xenobiotic Metabolism | PRKCE; EP300; PRKCZ; RXRA; MAPK1; NQO1; |
| Signaling | NCOR2; PIK3CA; ARNT; PRKC1; NFKB2; CAMK2A; |
| | PIK3CB; PPP2R1A; PIK3C3; MAPK8; PRKD1; |
| | ALDHIA1; MAPK3; NRIP1; KRAS; MAPK13; PRKCD; |
| | GSTP1; MAPK9; NOS2A; ABCB1; AHR; PPP2CA; FTL; |
| | NFE2L2; PIK3C2A; PPARGCIA; MAPK14; TNF; RAF1; |
| | CREBBP; MAP2K2; PIK3R1; PPP2R5C; MAP2K1; |
| | NFKB1; KEAP1; PRKCA; EIF2AK3; IL6; CYP1B1; |
| | HSP90AA1 |
| SAPK/JNK Signaling | PRKCE; IRAK1; PRKAA2; EIF2AK2; RAC1; ELK1; |
| | GRK6; MAPK1; GADD45A; RAC2; PLK1; AKT2; PIK3CA; |
| | FADD; CDK8; PIK3CB; PIK3C3; MAPK8; RIPK1; |
| | GNB2L1; IRS1; MAPK3; MAPK10; DAXX; KRAS; |
| | PRKCD; PRKAA1; MAPK9; CDK2; PIM1; PIK3C2A; |
| | TRAF2; TP53; LCK; MAP3K7; DYRK1A; MAP2K2; |
| | PIK3R1; MAP2K1; PAK3; CDC42; JUN; TTK; CSNK1A1; |
| | CRKL; BRAF; SGK |
| PPAr/RXR Signaling | PRKAA2; EP300; INS; SMAD2; TRAF6; PPARA; FASN; |
| | RXRA; MAPK1; SMAD3; GNAS; IKBKB; NCOR2; |
| | ABCA1; GNAQ; NFKB2; MAP3K14; STAT5B; MAPK8; |
| | IRS1; MAPK3; KRAS; RELA; PRKAA1; PPARGC1A; |
| | NCOA3; MAPK14; INSR; RAF1; IKBKG; RELB; MAP3K7; |
| | CREBBP; MAP2K2; JAK2; CHUK; MAP2K1; NFKB1; |
| | TGFBR1; SMAD4; JUN; IL1R1; PRKCA; IL6; HSP90AA1; |
| | ADIPOQ |
| NF-KB Signaling | IRAK1; EIF2AK2; EP300; INS; MYD88; PRKCZ; TRAF6; |
| | TBK1; AKT2; EGFR; IKBKB; PIK3CA; BTRC; NFKB2; |
| | MAP3K14; PIK3CB; PIK3C3; MAPK8; RIPK1; HDAC2; |
| | KRAS; RELA; PIK3C2A; TRAF2; TLR4; PDGFRB; TNF; |
| | INSR; LCK; IKBKG; RELB; MAP3K7; CREBBP; AKT1; |
| | PIK3R1; CHUK; PDGFRA; NFKB1; TLR2; BCL10; |
| | GSK3B; AKT3; TNFAIP3; ILIR1 |
| Neuregulin Signaling | ERBB4; PRKCE; ITGAM; ITGA5; PTEN; PRKCZ; ELK1; |
| Wnt & Beta catenin | MAPK1; PTPN11; AKT2; EGFR; ERBB2; PRKCI; |
| Signaling | CDKN1B; STAT5B; PRKD1; MAPK3; ITGA1; KRAS; |
| | PRKCD; STAT5A; SRC; ITGB7; RAF1; ITGB1; MAP2K2; |
| | ADAM17; AKT1; PIK3R1; PDPK1; MAP2K1; ITGB3; |
| | EREG; FRAP1; PSEN1; ITGA2; MYC; NRG1; CRKL; |
| | AKT3; PRKCA; HSP90AA1; RPS6KB1 |
| | CD44; EP300; LRP6; DVL3; CSNK1E; GJA1; SMO; |
| | AKT2; PIN1; CDH1; BTRC; GNAQ; MARK2; PPP2R1A; |
| | WNT11; SRC; DKK1; PPP2CA; SOX6; SFRP2; ILK; |
| | LEF1; SOX9; TP53; MAP3K7; CREBBP; TCF7L2; AKT1; |
| | PPP2R5C; WNT5A; LRP5; CTNNB1; TGFBR1; CCND1; |
| | GSK3A; DVL1; APC; CDKN2A; MYC; CSNK1A1; GSK3B; |
| | AKT3; SOX2 |
| Insulin Receptor Signaling | PTEN; INS; EIF4E; PTPN1; PRKCZ; MAPK1; TSC1; |
| | PTPN11; AKT2; CBL; PIK3CA; PRKCI; PIK3CB; PIK3C3; |
| | MAPK8; IRS1; MAPK3; TSC2; KRAS; EIF4EBP1; |
| | SLC2A4; PIK3C2A; PPP1CC; INSR; RAF1; FYN; |
| | MAP2K2; JAK1; AKT1; JAK2; PIK3R1; PDPK1; MAP2K1; |
| | GSK3A; FRAP1; CRKL; GSK3B; AKT3; FOXO1; SGK; |
| | RPS6KB1 |
| IL-6 Signaling | HSPB1; TRAF6; MAPKAPK2; ELK1; MAPK1; PTPN11; |
| | IKBKB; FOS; NFKB2; MAP3K14; MAPK8; MAPK3; |
| | MAPK10; IL6ST; KRAS; MAPK13; IL6R; RELA; SOCS1; |
| | MAPK9; ABCB1; TRAF2; MAPK14; TNF; RAF1; IKBKG; |
| | RELB; MAP3K7; MAP2K2; IL8; JAK2; CHUK; STAT3; |
| | MAP2K1; NFKB1; CEBPB; JUN; IL1R1; SRF; IL6 |
| Hepatic Cholestasis | PRKCE; IRAK1; INS; MYD88; PRKCZ; TRAF6; PPARA; |
| | RXRA; IKBKB; PRKC1; NFKB2; MAP3K14; MAPK8; |
| | PRKD1; MAPK10; RELA; PRKCD; MAPK9; ABCB1; |
| | TRAF2; TLR4; TNF; INSR; IKBKG; RELB; MAP3K7; IL8; |
| | CHUK; NR1H2; TJP2; NFKB1; ESR1; SREBF1; FGFR4; |
| | JUN; IL1R1; PRKCA; IL6 |
| IGF-1 Signaling | IGF1; PRKCZ; ELK1; MAPK1; PTPN11; NEDD4; AKT2; |
| | PIK3CA; PRKCI; PTK2; FOS; PIK3CB; PIK3C3; MAPK8; |
| | IGF1R; IRS1; MAPK3; IGFBP7; KRAS; PIK3C2A; |
| | YWHAZ; PXN; RAF1; CASP9; MAP2K2; AKT1; PIK3R1; |
| | PDPK1; MAP2K1; IGFBP2; SFN; JUN; CYR61; AKT3; |
| | FOXO1; SRF; CTGF; RPS6KB1 |
| NRF2-mediated Oxidative | PRKCE; EP300; SOD2; PRKCZ; MAPK1; SQSTM1; |
| Stress Response | NQO1; PIK3CA; PRKC1; FOS; PIK3CB; PIK3C3; MAPK8; |
| | PRKD1; MAPK3; KRAS; PRKCD; GSTP1; MAPK9; FTL; |
| | NFE2L2; PIK3C2A; MAPK14; RAF1; MAP3K7; CREBBP; |
| | MAP2K2; AKT1; PIK3R1; MAP2K1; PPIB; JUN; KEAP1; |
| | GSK3B; ATF4; PRKCA; EIF2AK3; HSP90AA1 |
| Hepatic Fibrosis/Hepatic | EDN1; IGF1; KDR; FLT1; SMAD2; FGFR1; MET; PGF; |
| Stellate Cell Activation | SMAD3; EGFR; FAS; CSF1; NFKB2; BCL2; MYH9; |
| | IGF1R; IL6R; RELA; TLR4; PDGFRB; TNF; RELB; IL8; |
| | PDGFRA; NFKB1; TGFBR1; SMAD4; VEGFA; BAX; |
| | IL1R1; CCL2; HGF; MMP1; STAT1; IL6; CTGF; MMP9 |
| PPAR Signaling | EP300; INS; TRAF6; PPARA; RXRA; MAPK1; IKBKB; |
| | NCOR2; FOS; NFKB2; MAP3K14; STAT5B; MAPK3; |
| | NRIP1; KRAS; PPARG; RELA; STAT5A; TRAF2; |
| | PPARGC1A; PDGFRB; TNF; INSR; RAF1; IKBKG; |
| | RELB; MAP3K7; CREBBP; MAP2K2; CHUK; PDGFRA; |
| | MAP2K1; NFKB1; JUN; IL1R1; HSP90AA1 |
| Fc Epsilon RI Signaling | PRKCE; RAC1; PRKCZ; LYN; MAPK1; RAC2; PTPN11; |
| | AKT2; PIK3CA; SYK; PRKC1; PIK3CB; PIK3C3; MAPK8; |
| | PRKD1; MAPK3; MAPK10; KRAS; MAPK13; PRKCD; |
| | MAPK9; PIK3C2A; BTK; MAPK14; TNF; RAF1; FYN; |
| | MAP2K2; AKT1; PIK3R1; PDPK1; MAP2K1; AKT3; |
| | VAV3; PRKCA |
| G-Protein Coupled | PRKCE; RAP1A; RGS16; MAPK1; GNAS; AKT2; IKBKB; |
| Receptor Signaling | PIK3CA; CREB1; GNAQ; NFKB2; CAMK2A; PIK3CB; |
| | PIK3C3; MAPK3; KRAS; RELA; SRC; PIK3C2A; RAF1; |
| | IKBKG; RELB; FYN; MAP2K2; AKT1; PIK3R1; CHUK; |
| | PDPK1; STAT3; MAP2K1; NFKB1; BRAF; ATF4; AKT3; |
| | PRKCA |
| Inositol Phosphate | PRKCE; IRAK1; PRKAA2; EIF2AK2; PTEN; GRK6; |
| Metabolism | MAPK1; PLK1; AKT2; PIK3CA; CDK8; PIK3CB; PIK3C3; |
| | MAPK8; MAPK3; PRKCD; PRKAA1; MAPK9; CDK2; |
| | PIM1; PIK3C2A; DYRK1A; MAP2K2; PIP5K1A; PIK3R1; |
| | MAP2K1; PAK3; ATM; TTK; CSNK1A1; BRAF; SGK |
| PDGF Signaling | EIF2AK2; ELK1; ABL2; MAPK1; PIK3CA; FOS; PIK3CB; |
| | PIK3C3; MAPK8; CAV1; ABL1; MAPK3; KRAS; SRC; |
| | PIK3C2A; PDGFRB; RAF1; MAP2K2; JAK1; JAK2; |
| | PIK3R1; PDGFRA; STAT3; SPHK1; MAP2K1; MYC; |
| | JUN; CRKL; PRKCA; SRF; STAT1; SPHK2 |
| VEGF Signaling | ACTN4; ROCK1; KDR; FLT1; ROCK2; MAPK1; PGF; |
| | AKT2; PIK3CA; ARNT; PTK2; BCL2; PIK3CB; PIK3C3; |
| | BCL2L1; MAPK3; KRAS; HIF1A; NOS3; PIK3C2A; PXN; |
| | RAF1; MAP2K2; ELAVL1; AKT1; PIK3R1; MAP2K1; SFN; |
| | VEGFA; AKT3; FOXO1; PRKCA |
| Natural Killer Cell Signaling | PRKCE; RAC1; PRKCZ; MAPK1; RAC2; PTPN11; |
| | KIR2DL3; AKT2; PIK3CA; SYK; PRKCI; PIK3CB; |
| | PIK3C3; PRKD1; MAPK3; KRAS; PRKCD; PTPN6; |
| | PIK3C2A; LCK; RAF1; FYN; MAP2K2; PAK4; AKT1; |
| | PIK3R1; MAP2K1; PAK3; AKT3; VAV3; PRKCA |
| Cell Cycle: G1/S | HDAC4; SMAD3; SUV39H1; HDAC5; CDKN1B; BTRC; |
| Checkpoint Regulation | ATR; ABL1; E2F1; HDAC2; HDAC7A; RB1; HDAC11; |
| | HDAC9; CDK2; E2F2; HDAC3; TP53; CDKN1A; CCND1; |
| | E2F4; ATM; RBL2; SMAD4; CDKN2A; MYC; NRG1; |
| | GSK3B; RBL1; HDAC6 |
| T Cell Receptor Signaling | RAC1; ELK1; MAPK1; IKBKB; CBL; PIK3CA; FOS; |
| | NFKB2; PIK3CB; PIK3C3; MAPK8; MAPK3; KRAS; |
| | RELA; PIK3C2A; BTK; LCK; RAF1; IKBKG; RELB; FYN; |
| | MAP2K2; PIK3R1; CHUK; MAP2K1; NFKB1; ITK; BCL10; |
| | JUN; VAV3 |
| Death Receptor Signaling | CRADD; HSPB1; BID; BIRC4; TBK1; IKBKB; FADD; |
| | FAS; NFKB2; BCL2; MAP3K14; MAPK8; RIPK1; CASP8; |
| | DAXX; TNFRSF10B; RELA; TRAF2; TNF; IKBKG; RELB; |
| | CASP9; CHUK; APAF1; NFKB1; CASP2; BIRC2; CASP3; |
| | BIRC3 |
| FGF Signaling | RAC1; FGFR1; MET; MAPKAPK2; MAPK1; PTPN11; |
| | AKT2; PIK3CA; CREB1; PIK3CB; PIK3C3; MAPK8; |
| | MAPK3; MAPK13; PTPN6; PIK3C2A; MAPK14; RAF1; |
| | AKT1; PIK3R1; STAT3; MAP2K1; FGFR4; CRKL; ATF4; |
| | AKT3; PRKCA; HGF |
| GM-CSF Signaling | LYN; ELK1; MAPK1; PTPN11; AKT2; PIK3CA; CAMK2A; |
| | STAT5B; PIK3CB; PIK3C3; GNB2L1; BCL2L1; MAPK3; |
| | ETS1; KRAS; RUNX1; PIM1; PIK3C2A; RAF1; MAP2K2; |
| | AKT1; JAK2; PIK3R1; STAT3; MAP2K1; CCND1; AKT3; |
| | STAT1 |
| Amyotrophic Lateral | BID; IGF1; RAC1; BIRC4; PGF; CAPNS1; CAPN2; |
| Sclerosis Signaling | PIK3CA; BCL2; PIK3CB; PIK3C3; BCL2L1; CAPN1; |
| | PIK3C2A; TP53; CASP9; PIK3R1; RAB5A; CASP1; |
| | APAF1; VEGFA; BIRC2; BAX; AKT3; CASP3; BIRC3 |
| JAK/Stat Signaling | PTPN1; MAPK1; PTPN11; AKT2; PIK3CA; STAT5B; |
| | PIK3CB; PIK3C3; MAPK3; KRAS; SOCS1; STAT5A; |
| | PTPN6; PIK3C2A; RAF1; CDKN1A; MAP2K2; JAK1; |
| | AKT1; JAK2; PIK3R1; STAT3; MAP2K1; FRAP1; AKT3; |
| | STAT1 |
| Nicotinate and Nicotinamide | PRKCE; IRAK1; PRKAA2; EIF2AK2; GRK6; MAPK1; |
| Metabolism | PLK1; AKT2; CDK8; MAPK8; MAPK3; PRKCD; PRKAA1; |
| | PBEF1; MAPK9; CDK2; PIM1; DYRK1A; MAP2K2; |
| | MAP2K1; PAK3; NT5E; TTK; CSNK1A1; BRAF; SGK |
| Chemokine Signaling | CXCR4; ROCK2; MAPK1; PTK2; FOS; CFL1; GNAQ; |
| | CAMK2A; CXCL12; MAPK8; MAPK3; KRAS; MAPK13; |
| | RHOA; CCR3; SRC; PPP1CC; MAPK14; NOX1; RAF1; |
| | MAP2K2; MAP2K1; JUN; CCL2; PRKCA |
| IL-2 Signaling | ELK1; MAPK1; PTPN11; AKT2; PIK3CA; SYK; FOS; |
| | STAT5B; PIK3CB; PIK3C3; MAPK8; MAPK3; KRAS; |
| | SOCS1; STAT5A; PIK3C2A; LCK; RAF1; MAP2K2; |
| | JAK1; AKT1; PIK3R1; MAP2K1; JUN; AKT3 |
| Synaptic Long Term | PRKCE; IGF1; PRKCZ; PRDX6; LYN; MAPK1; GNAS; |
| Depression | PRKCI; GNAQ; PPP2R1A; IGF1R; PRKD1; MAPK3; |
| | KRAS; GRN; PRKCD; NOS3; NOS2A; PPP2CA; |
| | YWHAZ; RAF1; MAP2K2; PPP2R5C; MAP2K1; PRKCA |
| Estrogen Receptor | TAF4B; EP300; CARM1; PCAF; MAPK1; NCOR2; |
| Signaling | SMARCA4; MAPK3; NRIP1; KRAS; SRC; NR3C1; |
| | HDAC3; PPARGC1A; RBM9; NCOA3; RAF1; CREBBP; |
| | MAP2K2; NCOA2; MAP2K1; PRKDC; ESR1; ESR2 |
| Protein Ubiquitination | TRAF6; SMURF1; BIRC4; BRCA1; UCHL1; NEDD4; |
| Pathway | CBL; UBE21; BTRC; HSPA5; USP7; USP10; FBXW7; |
| | USP9X; STUB1; USP22; B2M; BIRC2; PARK2; USP8; |
| | USP1; VHL; HSP90AA1; BIRC3 |
| IL-10 Signaling | TRAF6; CCR1; ELK1; IKBKB; SP1; FOS; NFKB2; |
| | MAP3K14; MAPK8; MAPK13; RELA; MAPK14; TNF; |
| | IKBKG; RELB; MAP3K7; JAK1; CHUK; STAT3; NFKB1; |
| | JUN; ILIR1; IL6 |
| VDR/RXR Activation | PRKCE; EP300; PRKCZ; RXRA; GADD45A; HES1; |
| | NCOR2; SP1; PRKC1; CDKN1B; PRKD1; PRKCD; |
| | RUNX2; KLF4; YY1; NCOA3; CDKN1A; NCOA2; SPP1; |
| | LRP5; CEBPB; FOXO1; PRKCA |
| TGF-beta Signaling | EP300; SMAD2; SMURF1; MAPK1; SMAD3; SMAD1; |
| | FOS; MAPK8; MAPK3; KRAS; MAPK9; RUNX2; |
| | SERPINE1; RAF1; MAP3K7; CREBBP; MAP2K2; |
| | MAP2K1; TGFBR1; SMAD4; JUN; SMAD5 |
| Toll-like Receptor Signaling | IRAK1; EIF2AK2; MYD88; TRAF6; PPARA; ELK1; |
| | IKBKB; FOS; NFKB2; MAP3K14; MAPK8; MAPK13; |
| | RELA; TLR4; MAPK14; IKBKG; RELB; MAP3K7; CHUK; |
| | NFKB1; TLR2; JUN |
| p38 MAPK Signaling | HSPB1; IRAK1; TRAF6; MAPKAPK2; ELK1; FADD; FAS; |
| | CREB1; DDIT3; RPS6KA4; DAXX; MAPK13; TRAF2; |
| | MAPK14; TNF; MAP3K7; TGFBR1; MYC; ATF4; IL1R1; |
| | SRF; STAT1 |
| Neurotrophin/TRK Signaling | NTRK2; MAPK1; PTPN11; PIK3CA; CREB1; FOS; |
| | PIK3CB; PIK3C3; MAPK8; MAPK3; KRAS; PIK3C2A; |
| | RAF1; MAP2K2; AKT1; PIK3R1; PDPK1; MAP2K1; |
| | CDC42; JUN; ATF4 |
| FXR/RXR Activation | INS; PPARA; FASN; RXRA; AKT2; SDC1; MAPK8; |
| | APOB; MAPK10; PPARG; MTTP; MAPK9; PPARGC1A; |
| | TNF; CREBBP; AKT1; SREBF1; FGFR4; AKT3; FOXO1 |
| Synaptic Long Term | PRKCE; RAP1A; EP300; PRKCZ; MAPK1; CREB1; |
| Potentiation | PRKCI; GNAQ; CAMK2A; PRKD1; MAPK3; KRAS; |
| | PRKCD; PPP1CC; RAF1; CREBBP; MAP2K2; MAP2K1; |
| | ATF4; PRKCA |
| Calcium Signaling | RAP1A; EP300; HDAC4; MAPK1; HDAC5; CREB1; |
| | CAMK2A; MYH9; MAPK3; HDAC2; HDAC7A; HDAC11; |
| | HDAC9; HDAC3; CREBBP; CALR; CAMKK2; ATF4; |
| | HDAC6 |
| EGF Signaling | ELK1; MAPK1; EGFR; PIK3CA; FOS; PIK3CB; PIK3C3; |
| | MAPK8; MAPK3; PIK3C2A; RAF1; JAK1; PIK3R1; |
| | STAT3; MAP2K1; JUN; PRKCA; SRF; STAT1 |
| Hypoxia Signaling in the | EDN1; PTEN; EP300; NQO1; UBE2I; CREB1; ARNT; |
| Cardiovascular System | HIF1A; SLC2A4; NOS3; TP53; LDHA; AKT1; ATM; |
| | VEGFA; JUN; ATF4; VHL; HSP90AA1 |
| LPS/IL-1 Mediated Inhibition | IRAK1; MYD88; TRAF6; PPARA; RXRA; ABCA1; |
| of RXR Function | MAPK8; ALDH1A1; GSTP1; MAPK9; ABCB1; TRAF2; |
| | TLR4; TNF; MAP3K7; NR1H2; SREBF1; JUN; IL1R1 |
| LXR/RXR Activation | FASN; RXRA; NCOR2; ABCA1; NFKB2; IRF3; RELA; |
| | NOS2A; TLR4; TNF; RELB; LDLR; NR1H2; NFKB1; |
| | SREBF1; IL1R1; CCL2; IL6; MMP9 |
| Amyloid Processing | PRKCE; CSNKIE; MAPK1; CAPNS1; AKT2; CAPN2; |
| | CAPN1; MAPK3; MAPK13; MAPT; MAPK14; AKT1; |
| | PSEN1; CSNK1A1; GSK3B; AKT3; APP |
| IL-4 Signaling | AKT2; PIK3CA; PIK3CB; PIK3C3; IRS1; KRAS; SOCS1; |
| | PTPN6; NR3C1; PIK3C2A; JAK1; AKT1; JAK2; PIK3R1; |
| | FRAP1; AKT3; RPS6KB1 |
| Cell Cycle: G2/M DNA | EP300; PCAF; BRCA1; GADD45A; PLK1; BTRC; |
| Damage Checkpoint | CHEK1; ATR; CHEK2; YWHAZ; TP53; CDKN1A; |
| Regulation | PRKDC; ATM; SFN; CDKN2A |
| Nitric Oxide Signaling in the | KDR; FLT1; PGF; AKT2; PIK3CA; PIK3CB; PIK3C3; |
| Cardiovascular System | CAV1; PRKCD; NOS3; PIK3C2A; AKT1; PIK3R1; |
| | VEGFA; AKT3; HSP90AA1 |
| Purine Metabolism | NME2; SMARCA4; MYH9; RRM2; ADAR; EIF2AK4; |
| | PKM2; ENTPD1; RAD51; RRM2B; TJP2; RAD51C; |
| | NT5E; POLD1; NME1 |
| cAMP-mediated Signaling | RAP1A; MAPK1; GNAS; CREB1; CAMK2A; MAPK3; |
| | SRC; RAF1; MAP2K2; STAT3; MAP2K1; BRAF; ATF4 |
| Mitochondrial Dysfunction | SOD2; MAPK8; CASP8; MAPK10; MAPK9; CASP9; |
| Notch Signaling | PARK7; PSEN1; PARK2; APP; CASP3 |
| | HES1; JAG1; NUMB; NOTCH4; ADAM17; NOTCH2; |
| | PSEN1; NOTCH3; NOTCH1; DLL4 |
| Endoplasmic Reticulum | HSPA5; MAPK8; XBP1; TRAF2; ATF6; CASP9; ATF4; |
| Stress Pathway | EIF2AK3; CASP3 |
| Pyrimidine Metabolism | NME2; AICDA; RRM2; EIF2AK4; ENTPD1; RRM2B; |
| | NT5E; POLD1; NME1 |
| Parkinson's Signaling | UCHL1; MAPK8; MAPK13; MAPK14; CASP9; PARK7; |
| | PARK2; CASP3 |
| Cardiac & Beta Adrenergic | GNAS; GNAQ; PPP2R1A; GNB2L1; PPP2CA; PPP1CC; |
| Signaling | PPP2R5C |
| Glycolysis/Gluconeogenesis | HK2; GCK; GP1; ALDH1A1; PKM2; LDHA; HK1 |
| Interferon Signaling | IRF1; SOCS1; JAK1; JAK2; IFITM1; STAT1; IFIT3 |
| Sonic Hedgehog Signaling | ARRB2; SMO; GLI2; DYRK1A; GLI1; GSK3B; DYRK1B |
| Glycerophospholipid | PLD1; GRN; GPAM; YWHAZ; SPHK1; SPHK2 |
| Metabolism | |
| Phospholipid Degradation | PRDX6; PLD1; GRN; YWHAZ; SPHK1; SPHK2 |
| Tryptophan Metabolism | SIAH2; PRMT5; NEDD4; ALDH1A1; CYP1B1; SIAH1 |
| Lysine Degradation | SUV39H1; EHMT2; NSD1; SETD7; PPP2R5C |
| Nucleotide Excision Repair | ERCC5; ERCC4; XPA; XPC; ERCC1 |
| Pathway | |
| Starch and Sucrose | UCHL1; HK2; GCK; GP1; HK1 |
| Metabolism | |
| Aminosugars Metabolism | NQO1; HK2; GCK; HK1 |
| Arachidonic Acid | PRDX6; GRN; YWHAZ; CYP1B1 |
| Metabolism | |
| Circadian Rhythm Signaling | CSNK1E; CREB1; ATF4; NR1D1 |
| Coagulation System | BDKRB1; F2R; SERPINE1; F3 |
| Dopamine Receptor | PPP2R1A; PPP2CA; PPP1CC; PPP2R5C |
| Signaling | |
| Glutathione Metabolism | IDH2; GSTP1; ANPEP; IDH1 |
| Glycerolipid Metabolism | ALDH1A1; GPAM; SPHK1; SPHK2 |
| Linoleic Acid Metabolism | PRDX6; GRN; YWHAZ; CYP1B1 |
| Methionine Metabolism | DNMT1; DNMT3B; AHCY; DNMT3A |
| Pyruvate Metabolism | GLO1; ALDH1A1; PKM2; LDHA |
| Arginine and Proline | ALDH1A1; NOS3; NOS2A |
| Metabolism | |
| Eicosanoid Signaling | PRDX6; GRN; YWHAZ |
| Fructose and Mannose | HK2; GCK; HK1 |
| Metabolism | |
| Galactose Metabolism | HK2; GCK; HK1 |
| Stilbene, Coumarine and | PRDX6; PRDX1; TYR |
| Lignin Biosynthesis | |
| Antigen Presentation | CALR; B2M |
| Pathway | |
| Biosynthesis of Steroids | NQO1; DHCR7 |
| Butanoate Metabolism | ALDH1A1; NLGN1 |
| Citrate Cycle | IDH2; IDH1 |
| Fatty Acid Metabolism | ALDH1A1; CYP1B1 |
| Glycerophospholipid | PRDX6; CHKA |
| Metabolism | |
| Histidine Metabolism | PRMT5; ALDH1A1 |
| Inositol Metabolism | ERO1L; APEX1 |
| Metabolism of Xenobiotics | GSTP1; CYP1B1 |
| by Cytochrome p450 | |
| Methane Metabolism | PRDX6; PRDX1 |
| Phenylalanine Metabolism | PRDX6; PRDX1 |
| Propanoate Metabolism | ALDH1A1; LDHA |
| Selenoamino Acid | PRMT5; AHCY |
| Metabolism | |
| Sphingolipid Metabolism | SPHK1; SPHK2 |
| Aminophosphonate | PRMT5 |
| Metabolism | |
| Androgen and Estrogen | PRMT5 |
| Metabolism | |
| Ascorbate and Aldarate | ALDH1A1 |
| Metabolism | |
| Bile Acid Biosynthesis | ALDH1A1 |
| Cysteine Metabolism | LDHA |
| Fatty Acid Biosynthesis | FASN |
| Glutamate Receptor | GNB2L1 |
| Signaling | |
| NRF2-mediated Oxidative | PRDX1 |
| Stress Response | |
| Pentose Phosphate | GPI |
| Pathway | |
| Pentose and Glucuronate | UCHL1 |
| Interconversions | |
| Retinol Metabolism | ALDH1A1 |
| Riboflavin Metabolism | TYR |
| Tyrosine Metabolism | PRMT5, TYR |
| Ubiquinone Biosynthesis | PRMT5 |
| Valine, Leucine and | ALDH1A1 |
| Isoleucine Degradation | |
| Glycine, Serine and | CHKA |
| Threonine Metabolism | |
| Lysine Degradation | ALDH1A1 |
| Pain/Taste | TRPM5; TRPA1 |
| Pain | TRPM7; TRPC5; TRPC6; TRPC1; Cnr1; cnr2; Grk2; |
| | Trpa1; Pomc; Cgrp; Crf; Pka; Era; Nr2b; TRPM5; Prkaca; |
| | Prkacb; Prkar1a; Prkar2a |
| Mitochondrial Function | AIF; CytC; SMAC (Diablo); Aifm-1; Aifm-2 |
| Developmental Neurology | BMP-4; Chordin (Chrd); Noggin (Nog); WNT (Wnt2; |
| | Wnt2b; Wnt3a; Wnt4; Wnt5a; Wnt6; Wnt7b; Wnt8b; |
| | Wnt9a; Wnt9b; Wnt10a; Wnt10b; Wnt16); beta-catenin; |
| | Dkk-1; Frizzled related proteins; Otx-2; Gbx2; FGF-8; |
| | Reelin; Dab1; unc-86 (Pou4f1 or Brn3a); Numb; Reln |

[0659] In an aspect, the invention provides a method of individualized or personalized treatment of a genetic disease in a subject in need of such treatment comprising: (a) introducing one or more mutations ex vivo in a tissue, organ or a cell line, or in vivo in a transgenic non-human mammal, comprising delivering to cell(s) of the tissue, organ, cell or mammal a composition comprising the particle delivery system or the delivery system or the virus particle of any one of the above embodiment or the cell of any one of the above embodiment, wherein the specific mutations or precise sequence substitutions are or have been correlated to the genetic disease; (b) testing treatment(s) for the genetic disease on the cells to which the vector has been delivered that have the specific mutations or precise sequence substitutions correlated to the genetic disease; and (c) treating the subject based on results from the testing of treatment(s) of step (b).

### Infectious Diseases

[0660] In one embodiment, the composition, system, (s) or component(s) thereof can be used to diagnose, prognose, treat, and/or prevent an infectious disease caused by a microorganism, such as bacteria, virus, fungi, parasites, or combinations thereof.

[0661] In one embodiment, the system(s) or component(s) thereof can be capable of targeting specific microorganism within a mixed population. Exemplary methods of such techniques are described in e.g. Gomaa A A, Klumpe H E, Luo M L, Selle K, Barrangou R, Beisel C L. 2014. Programmable removal of bacterial strains by use of genome-targeting composition, systems, mBio 5: e00928-13; Citorik R J, Mimee M, Lu T K. 2014. Sequence-specific antimicrobials using efficiently delivered RNA-guided nucleases. Nat Biotechnol 32:1141-1145, the teachings of which can be adapted for use with the compositions, systems, and components thereof described herein.

[0662] In one embodiment, the composition, system, (s) and/or components thereof can be capable of targeting pathogenic and/or drug-resistant microorganisms, such as bacteria, virus, parasites, and fungi. In one embodiment, the composition, system, (s) and/or components thereof can be capable of targeting and modifying one or more polynucleotides in a pathogenic microorganism such that the microorganism is less virulent, killed, inhibited, or is otherwise rendered incapable of causing disease and/or infecting and/or replicating in a host cell.

[0663] In one embodiment, the pathogenic bacteria that can be targeted and/or modified by the composition, system, (s) and/or component(s) thereof described herein include, but are not limited to, those of the genus Actinomyces (e.g. A. israelii), Bacillus (e.g. B. anthracis, B. cereus), Bactereoides (e.g. B. fragilis), Bartonella (B. henselae, B. quintana), Bordetella (B. pertussis), Borrelia (e.g. B. burgdorferi, B. garinii, B. afzelii, and B. recurreentis), Brucella (e.g. B. abortus, B. canis, B. melitensis, and B. suis), Campylobacter (e.g. C. jejuni), Chlamydia (e.g. C pneumoniae and C. trachomatis), Chlamydophila (e.g. C. psittaci), Clostridium (e.g. C. botulinum, C. difficile, C. perfringens. C. tetani), Corynebacterium (e.g. C. diptheriae), Enterococcus (e.g. E. Faecalis, E. faecium), Ehrlichia (E. canis and E. chaffensis) Escherichia (e.g. E. coli), Francisella (e.g. F. tularensis), Haemophilus (e.g. H. influenzae), Helicobacter (H. pylori), Klebsiella (E.g. K. pneumoniae), Legionella (e.g. L. pneumophila), Leptospira (e.g. L. interrogans, L. santarosai, L. weilii, L. noguchii), Listereia (e.g. L. monocytogeenes), Mycobacterium (e.g. M. leprae, M. tuberculosis, M. ulcerans), Mycoplasma (M. pneumoniae), Neisseria (N. gonorrhoeae and N. menigitidis), Nocardia (e.g. N. asteeroides), Pseudomonas (P. aeruginosa), Rickettsia (R. rickettsia), Salmonella (S. typhi and S. typhimurium), Shigella (S. sonnei and S. dysenteriae), Staphylococcus (S. aureus, S. epidermidis, and S. saprophyticus), Streptococcus (S. agalactiaee, S. pneumoniae, S. pyogenes), Treponema (T. pallidum), Ureeaplasma (e.g. (J. urealyticum), Vibrio (e.g. V. cholerae), Yersinia (e.g. Y. pestis, Y. enterocolitica, and Y. pseudotuberculosis).

[0664] In one embodiment, the pathogenic virus that can be targeted and/or modified by the composition, system(s), and/or component(s) thereof described herein include, but are not limited to, a double-stranded DNA virus, a partly double-stranded DNA virus, a single-stranded DNA virus, a positive single-stranded RNA virus, a negative single-stranded RNA virus, or a double stranded RNA virus. In one embodiment, the pathogenic virus can be from the family Adenoviridae (e.g. Adenovirus), Herpeesviridae (e.g. Herpes simplex, type 1, Herpes simplex, type 2, Varicella-zoster virus, Epstein-Barr virus, Human cytomegalovirus, Human herpesvirus, type 8), Papillomaviridae (e.g. Human papillomavirus), Polyomaviridae (e.g. BK virus, JC virus), Poxviridae (e.g. smallpox), Hepadnaviridae (e.g. Hepatitis B), Parvoviridae (e.g. Parvovirus B19), Astroviridae (e.g. Human astrovirus), Caliciviridae (e.g. Norwalk virus), Picornaviridae (e.g. coxsackievirus, hepatitis A virus, poliovirus, rhinovirus), Coronaviridae (e.g. Severe acute respiratory syndrome-related coronavirus, strains: Severe acute respiratory syndrome virus, Severe acute respiratory syndrome coronavirus 2 (COVID-19)), Flaviviridae (e.g. Hepatitis C virus, yellow fever virus, dengue virus, West Nile virus, TBE virus), Togaviridae (e.g. Rubella virus), Hepeviridae (e.g. Hepatitis E virus), Retroviridae (Human immunodeficiency virus (HIV)), Orthomyxoviridae (e.g. Influenza virus), Arenaviridae (e.g. Lassa virus), Bunyaviridae (e.g. Crimean-Congo hemorrhagic fever virus, Hantaan virus), Filoviridae (e.g. Ebola virus and Marburg virus), Paramyxoviridae (e.g. Measles virus, Mumps virus, Parainfluenza virus, Respiratory syncytial virus), Rhabdoviridae (Rabies virus), Hepatits D virus, Reoviridae (e.g. Rotavirus, Orbivirus, Coltivirus, Banna virus).

[0665] In one embodiment, the pathogenic fungi that can be targeted and/or modified by the composition, system, (s) and/or component(s) thereof described herein include, but are not limited to, those of the genus Candida (e.g. C. albicans), Aspergillus (e.g. A. fumigatus, A. flavus, A. clavatus), Cryptococcus (e.g. C. neoformans, C. gattii), Histoplasma (H. capsulatum), Pneumocystis (e.g. P. jiroveecii), Stachybotrys (e.g. S. chartarum).

[0666] In one embodiment, the pathogenic parasites that can be targeted and/or modified by the composition, system(s), and/or component(s) thereof described herein include, but are not limited to, protozoa, helminths, and ectoparasites. In one embodiment, the pathogenic protozoa that can be targeted and/or modified by the composition, system(s), and/or component(s) thereof described herein include, but are not limited to, those from the groups Sarcodina (e.g. ameba such as Entamoeba), Mastigophora (e.g. flagellates such as Giardia and Leishmania), Cilophora (e.g. ciliates such as Balantidum), and sporozoa (e.g. plasmodium and cryptosporidium). In one embodiment, the pathogenic helminths that can be targeted and/or modified by the composition, system(s), and/or component(s) thereof described herein include, but are not limited to, flatworms (platyhelminths), thorny-headed worms (acanthoceephalins), and roundworms (nematodes). In one embodiment, the pathogenic ectoparasites that can be targeted and/or modified by the composition, system(s), and/or component(s) thereof described herein include, but are not limited to, ticks, fleas, lice, and mites.

[0667] In one embodiment, the pathogenic parasite that can be targeted and/or modified by the composition, system, (s) and/or component(s) thereof described herein include, but are not limited to, Acanthamoeba spp., Balamuthia mandrillaris, Babesiosis spp. (e.g. Babesia B. divergens, B. bigemina, B. equi, B. microfti, B. duncani), Balantidiasis spp. (e.g. Balantidium coli), Blastocystis spp., Cryptosporidium spp., Cyclosporiasis spp. (e.g. Cyclospora cayetanensis), Dientamoebiasis spp. (e.g. Dientamoeba fragilis), Amoebiasis spp. (e.g. Entamoeba histolytica), Giardiasis spp. (e.g. Giardia lamblia), Isosporiasis spp. (e.g. Isospora belli), Leishmania spp., Naegleria spp. (e.g. Naegleria fowleri), Plasmodium spp. (e.g. Plasmodium falciparum, Plasmodium vivax, Plasmodium ovale curtisi, Plasmodium ovale wallikeri, Plasmodium malariae, Plasmodium knowlesi), Rhinosporidiosis spp. (e.g. Rhinosporidium seeberi), Sarcocystosis spp. (e.g. Sarcocystis bovihominis, Sarcocystis suihominis), Toxoplasma spp. (e.g. Toxoplasma gondii), Trichomonas spp. (e.g. Trichomonas vaginalis), Trypanosoma spp. (e.g. Trypanosoma brucei), Trypanosoma spp. (e.g. Trypanosoma cruzi), Tapeworm (e.g. Cestoda, Taenia multiceps, Taenia saginata, Taenia solium), Diphyllobothrium latum spp., Echinococcus spp. (e.g. Echinococcus granulosus, Echinococcus multilocularis, E. vogeli, E. oligarthrus), Hymenolepis spp. (e.g. Hymenolepis nana, Hymenolepis diminuta), Bertiella spp. (e.g. Bertiella mucronata, Bertiella studeri), Spirometra (e.g. Spirometra erinaceieuropaei), Clonorchis spp. (e.g. Clonorchis sinensis; Clonorchis viverrini), Dicrocoelium spp. (e.g. Dicrocoelium dendriticum), Fasciola spp. (e.g. Fasciola hepatica, Fasciola gigantica), Fasciolopsis spp. (e.g. Fasciolopsis buski), Metagonimus spp. (e.g. Metagonimus yokogawai), Metorchis spp. (e.g. Metorchis conjunctus), Opisthorchis spp. (e.g. Opisthorchis viverrini, Opisthorchis felineus), Clonorchis spp. (e.g. Clonorchis sinensis), Paragonimus spp. (e.g. Paragonimus westermani; Paragonimus africanus; Paragonimus caliensis; Paragonimus kellicotti; Paragonimus skrjabini; Paragonimus uterobilateralis), Schistosoma sp., Schistosoma spp. (e.g. Schistosoma mansoni, Schistosoma haematobium, Schistosoma japonicum, Schistosoma mekongi, and Schistosoma intercalatum), Echinostoma spp. (e.g. E. echinatum), Trichobilharzia spp. (e.g. Trichobilharzia regent), Ancylostoma spp. (e.g. Ancylostoma duodenale), Necator spp. (e.g. Necator americanus), Angiostrongylus spp., Anisakis spp., Ascaris spp. (e.g. Ascaris lumbricoides), Baylisascaris spp. (e.g. Baylisascaris procyonis), Brugia spp. (e.g. Brugia malayi, Brugia timori), Dioctophyme spp. (e.g. Dioctophyme renale), Dracunculus spp. (e.g. Dracunculus medinensis), Enterobius spp. (e.g. Enterobius vermicularis, Enterobius gregorii), Gnathostoma spp. (e.g. Gnathostoma spinigerum, Gnathostoma hispidum), Halicephalobus spp. (e.g. Halicephalobus gingivalis), Loa loa spp. (e.g. Loa loa filaria), Mansonella spp. (e.g. Mansonella streptocerca), Onchocerca spp. (e.g. Onchocerca volvulus), Strongyloides spp. (e.g. Strongyloides stercoralis), Thelazia spp. (e.g. Thelazia californiensis, Thelazia callipaeda), Toxocara spp. (e.g. Toxocara canis, Toxocara cati, Toxascaris leonine), Trichinella spp. (e.g. Trichinella spiralis, Trichinella britovi, Trichinella nelsoni, Trichinella nativa), Trichuris spp. (e.g. Trichuris trichiura, Trichuris vulpis), Wuchereria spp. (e.g. Wuchereria bancrofti), Dermatobia spp. (e.g. Dermatobia hominis), Tunga spp. (e.g. Tunga penetrans), Cochliomyia spp. (e.g. Cochliomyia hominivorax), Linguatula spp. (e.g. Linguatula serrata), Archiacanthocephala sp., Moniliformis sp. (e.g. Moniliformis moniliformis), Pediculus spp. (e.g. Pediculus humanus capitis, Pediculus humanus humanus), Pthirus spp. (e.g. Pthirus pubis), Arachnida spp. (e.g. Trombiculidae, Ixodidae, Argaside), Siphonaptera spp (e.g. Siphonaptera: Pulicinae), Cimicidae spp. (e.g. Cimex lectularius and Cimex hemipterus), Diptera spp., Demodex spp. (e.g. Demodex folliculorum brevis canis), Sarcoptes spp. (e.g. Sarcoptes scabiei), Dermanyssus spp. (e.g. Dermanyssus gallinae), Ornithonyssus spp. (e.g. Ornithonyssus sylviarum, Ornithonyssus bursa, Ornithonyssus bacoti), Laelaps spp. (e.g. Laelaps echidnina), Liponyssoides spp. (e.g. Liponyssoides sanguineus).

[0668] In one embodiment the gene targets can be any of those as set forth in Table 1 of Strich and Chertow. 2019. J. Clin. Microbio. 57:4 e01307-18, which is incorporated herein as if expressed in its entirety herein.

[0669] In one embodiment, the method can include delivering a composition, system, and/or component thereof to a pathogenic organism described herein, allowing the composition, system, and/or component thereof to specifically bind and modify one or more targets in the pathogenic organism, whereby the modification kills, inhibits, reduces the pathogenicity of the pathogenic organism, or otherwise renders the pathogenic organism non-pathogenic. In one embodiment, delivery of the composition, system, occurs in vivo (i.e. in the subject being treated). In one embodiment occurs by an intermediary, such as microorganism or phage that is non-pathogenic to the subject but is capable of transferring polynucleotides and/or infecting the pathogenic microorganism. In one embodiment, the intermediary microorganism can be an engineered bacteria, virus, or phage that contains the composition, system(s), and/or component(s) thereof and/or vectors and/or vector systems. The method can include administering an intermediary microorganism containing the composition, system(s), and/or component(s) thereof and/or vectors and/or vector systems to the subject to be treated. The intermediary microorganism can then produce the compositions and/or component thereof or transfer a composition, system, polynucleotide to the pathogenic organism. In embodiments, where the compositions and/or component thereof, vector, or vector system is transferred to the pathogenic microorganism, the composition, system, or component thereof is then produced in the pathogenic microorganism and modifies the pathogenic microorganism such that it is less virulent, killed, inhibited, or is otherwise rendered incapable of causing disease and/or infecting and/or replicating in a host or cell thereof.

[0670] In one embodiment, where the pathogenic microorganism inserts its genetic material into the host cell's genome (e.g. a virus), the composition, system, can be designed such that it modifies the host cell's genome such that the viral DNA or cDNA cannot be replicated by the host cell's machinery into a functional virus. In one embodiment, where the pathogenic microorganism inserts its genetic material into the host cell's genome (e.g. a virus), the composition, system, can be designed such that it modifies the host cell's genome such that the viral DNA or cDNA is deleted from the host cell's genome.

[0671] It will be appreciated that inhibiting or killing the pathogenic microorganism, the disease and/or condition that its infection causes in the subject can be treated or prevented. Thus, also provided herein are methods of treating and/or preventing one or more diseases or symptoms thereof caused by any one or more pathogenic microorganisms, such as any of those described herein.

### Mitochondrial Diseases

[0672] Some of the most challenging mitochondrial disorders arise from mutations in mitochondrial DNA (mtDNA), a high copy number genome that is maternally inherited. In one embodiment, mtDNA mutations can be modified using a composition, system, described herein. In one embodiment, the mitochondrial disease that can be diagnosed, prognosed, treated, and/or prevented can be MELAS (mitochondrial myopathy encephalopathy, and lactic acidosis and stroke-like episodes), CPEO/PEO (chronic progressive external ophthalmoplegia syndrome/progressive external ophthalmoplegia), KSS (Kearns-Sayre syndrome), MIDD (maternally inherited diabetes and deafness), MERRF (myoclonic epilepsy associated with ragged red fibers), NIDDM (noninsulin-dependent diabetes mellitus), LHON (Leber hereditary optic neuropathy), LS (Leigh Syndrome) an aminoglycoside induced hearing disorder, NARP (neuropathy, ataxia, and pigmentary retinopathy), Extrapyramidal disorder with akinesia-rigidity, psychosis and SNHL, Nonsyndromic hearing loss a cardiomyopathy, an encephalomyopathy, Pearson's syndrome, or a combination thereof.

[0673] In one embodiment, the mtDNA of a subject can be modified in vivo or ex vivo. In one embodiment, where the mtDNA is modified ex vivo, after modification the cells containing the modified mitochondria can be administered back to the subject. In one embodiment, the composition, system, or component thereof can be capable of correcting an mtDNA mutation, or a combination thereof.

[0674] In one embodiment, at least one of the one or more mtDNA mutations is selected from the group consisting of: A3243G, C3256T, T3271C, G1019A, A1304T, A15533G, C1494T, C4467A, T1658C, G12315A, A3421G, A8344G, T8356C, G8363A, A13042T, T3200C, G3242A, A3252G, T3264C, G3316A, T3394C, T14577C, A4833G, G3460A, G9804A, G11778A, G14459A, A14484G, G15257A, T8993C, T8993G, G10197A, G13513A, T1095C, C1494T, A1555G, G1541A, C1634T, A3260G, A4269G, T7587C, A8296G, A8348G, G8363A, T9957C, T9997C, G12192A, C12297T, A14484G, G15059A, duplication of CCCCCTCCCC-tandem (SEQ ID NO: 1566) repeats at positions 305-314 and/or 956-965, deletion at positions from 8,469-13,447, 4,308-14,874, and/or 4,398-14,822, 961ins/delC, the mitochondrial common deletion (e.g. mtDNA 4,977 bp deletion), and combinations thereof.

[0675] In one embodiment, the mitochondrial mutation can be any mutation as set forth in or as identified by use of one or more bioinformatic tools available at Mitomap available at mitomap.org. Such tools include, but are not limited to, “Variant Search, aka Market Finder”, Find Sequences for Any Haplogroup, aka “Sequence Finder”, “Variant Info”, “POLG Pathogenicity Prediction Server”, “MITOMASTER”, “Allele Search”, “Sequence and Variant Downloads”, “Data Downloads”. MitoMap contains reports of mutations in mtDNA that can be associated with disease and maintains a database of reported mitochondrial DNA Base Substitution Diseases: rRNA/tRNA mutations.

[0676] In one embodiment, the method includes delivering a composition, system, and/or a component thereof to a cell, and more specifically one or more mitochondria in a cell, allowing the composition, system, and/or component thereof to modify one or more target polynucleotides in the cell, and more specifically one or more mitochondria in the cell. The target polynucleotides can correspond to a mutation in the mtDNA, such as any one or more of those described herein. In one embodiment, the modification can alter a function of the mitochondria such that the mitochondria functions normally or at least is/are less dysfunctional as compared to an unmodified mitochondria. Modification can occur in vivo or ex vivo. Where modification is performed ex vivo, cells containing modified mitochondria can be administered to a subject in need thereof in an autologous or allogenic manner.

### Microbiome Modification

[0677] Microbiomes play important roles in health and disease. For example, the gut microbiome can play a role in health by controlling digestion, preventing growth of pathogenic microorganisms and have been suggested to influence mood and emotion. Imbalanced microbiomes can promote disease and are suggested to contribute to weight gain, unregulated blood sugar, high cholesterol, cancer, and other disorders. A healthy microbiome has a series of joint characteristics that can be distinguished from non-healthy individuals, thus detection and identification of the disease-associated microbiome can be used to diagnose and detect disease in an individual. The compositions, systems, and components thereof can be used to screen the microbiome cell population and be used to identify a disease associated microbiome. Cell screening methods utilizing compositions, systems, and components thereof are described elsewhere herein and can be applied to screening a microbiome, such as a gut, skin, vagina, and/or oral microbiome, of a subject.

[0678] In one embodiment, the microbe population of a microbiome in a subject can be modified using a composition, system, and/or component thereof described herein. In one embodiment, the composition, system, and/or component thereof can be used to identify and select one or more cell types in the microbiome and remove them from the microbiome population. Exemplary methods of selecting cells using a composition, system, and/or component thereof are described elsewhere herein. In this way the make-up or microorganism profile of the microbiome can be altered. In one embodiment, the alteration causes a change from a diseased microbiome composition to a healthy microbiome composition. In this way the ratio of one type or species of microorganism to another can be modified, such as going from a diseased ratio to a healthy ratio. In one embodiment, the cells selected are pathogenic microorganisms.

[0679] In one embodiment, the compositions and systems described herein can be used to modify a polynucleotide in a microorganism of a microbiome in a subject. In one embodiment, the microorganism is a pathogenic microorganism. In one embodiment, the microorganism is a commensal and non-pathogenic microorganism. Methods of modifying polynucleotides in a cell in the subject are described elsewhere herein and can be applied to these embodiments.

### Models of Diseases and Conditions

[0680] In an aspect, the invention provides a method of modeling a disease associated with a genomic locus in a eukaryotic organism or a non-human organism comprising manipulation of a target sequence within a coding, non-coding or regulatory element of said genomic locus comprising delivering a non-naturally occurring or engineered composition comprising a viral vector system comprising one or more viral vectors operably encoding a composition for expression thereof, wherein the composition comprises particle delivery system or the delivery system or the virus particle of any one of the above embodiments or the cell of any one of the above embodiment.

[0681] In one aspect, the invention provides a method of generating a model eukaryotic cell that can include one or more a mutated disease genes and/or infectious microorganisms. In one embodiment, a disease gene is any gene associated an increase in the risk of having or developing a disease. In one embodiment, the method includes (a) introducing one or more vectors into a eukaryotic cell, wherein the one or more vectors comprise a composition, system, and/or component thereof and/or a vector or vector system that is capable of driving expression of a composition, system, and/or component thereof including, but not limited to: a ωRNA sequence, one or more IsrB polypeptide nucleases, and combinations thereof and (b) allowing a composition, system, or complex to bind to one or more target polynucleotides, e.g., to effect cleavage, nicking, or other modification of the target polynucleotide within said disease gene, wherein the composition, system, or complex is composed of one or more IsrB polypeptide nuclease complexed with (1) one or more ωRNAs that is/are hybridized to the target sequence(s) within the target polynucleotide(s), and optionally (2) the ωRNA scaffold sequence(s), thereby generating a model eukaryotic cell comprising one or more mutated disease gene(s). Thus, In one embodiment the composition and system, contains nucleic acid molecules for and drives expression of one or more of: a IsrB polypeptide nuclease, a ωRNA sequence and/or a Homologous Recombination template and/or a stabilizing ligand if the IsrB polypeptide nuclease has a destabilization domain. In one embodiment, said cleavage comprises cleaving one or two strands at the location of the target sequence by the IsrB polypeptide nuclease. In one embodiment, nicking comprises nicking one or two strands at the location of the target sequence by the IsrB polypeptide nuclease. In one embodiment, said cleavage or nicking results in modified transcription of a target polynucleotide. In one embodiment, modification results in decreased transcription of the target polynucleotide. In one embodiment, the method further comprises repairing said cleaved or nicked target polynucleotide by homologous recombination with a recombination template polynucleotide, wherein said repair results in a mutation comprising an insertion, deletion, or substitution of one or more nucleotides of said target polynucleotide. In one embodiment, said mutation results in one or more amino acid changes in a protein expression from a gene comprising the target sequence.

[0682] The disease modeled can be any disease with a genetic or epigenetic component. In one embodiment, the disease modeled can be any as discussed elsewhere herein.

### In Situ Disease Detection

[0683] The compositions, systems, and/or components thereof can be used for diagnostic methods of detection such as in CASFISH (see e.g. Deng et al. 2015. PNAS USA 112 (38): 11870-11875), CRISPR-Live FISH (see e.g. Wang et al. 2020. Science; 365 (6459): 1301-1305), sm-FISH (Lee and Jefcoate. 2017. Front. Endocrinol. doi.org/10.3389/fendo.2017.00289), sequential FISH CRISPRainbow (Ma et al. Nat Biotechnol, 34 (2016), pp. 528-530), CRISPR-Sirius (Nat Methods, 15 (2018), pp. 928-931), Casilio (Cheng et al. Cell Res, 26 (2016), pp. 254-257), Halo-Tag based genomic loci visualization techniques (e.g. Deng et al. 2015. PNAS USA 112 (38): 11870-11875; Knight et al., Science, 350 (2015), pp. 823-826), RNA-aptamer based methods (e.g. Ma et al., J Cell Biol, 214 (2016), pp. 529-537), molecular beacon-based methods (e.g. Zhao et al. Biomaterials, 100 (2016), pp. 172-183; Wu et al. Nucleic Acids Res (2018)), Quantum Dot-based systems (e.g. Ma et al. Anal Chem, 89 (2017), pp. 12896-12901), multiplexed methods (e.g. Ma et al., Proc Natl Acad Sci USA, 112 (2015), pp. 3002-3007; Fu et al. Nat Commun, 7 (2016), p. 11707; Ma et al. Nat Biotechnol, 34 (2016), pp. 528-530; Shao et al. Nucleic Acids Res, 44 (2016), Article e86); Wang et al. Sci Rep, 6 (2016), p. 26857), ç, and other in situ CRISPR-hybridization based methods (e.g. Chen et al. Cell, 155 (2013), pp. 1479-1491; Gu et al. Science, 359 (2018), pp. 1050-1055; Tanebaum et al. Cell, 159 (2014), pp. 635-646; Ye et al. Protein Cell, 8 (2017), pp. 853-855; Chen et al. Nat Commun, 9 (2018), p. 5065; Shao et al. ACS Synth Biol (2017); Fu et al. Nat Commun, 7 (2016), p. 11707; Shao et al. Nucleic Acids Res, 44 (2016), Article e86; Wang et al., Sci Rep, 6 (2016), p. 26857), all of which are incorporated by reference herein as if expressed in their entirety and whose teachings can be adapted to the compositions, systems, and components thereof described herein in view of the description herein.

[0684] In one embodiment, the composition, system, or component thereof can be used in a detection method, such as an in-situ detection method described herein. In one embodiment, the composition, system, or component thereof can include a catalytically inactivate IscB polypeptide nuclease described herein and use this system in detection methods such as fluorescence in situ hybridization (FISH) or any other described herein. In one embodiment, the inactivated IscB polypeptide nuclease, which lacks the ability to produce DNA double-strand breaks may be fused with a marker, such as fluorescent protein, such as the enhanced green fluorescent protein (eEGFP) and co-expressed with small guide RNAs to target pericentric, centric and telomeric repeats in vivo. The dead IsrB polypeptide nuclease or system thereof can be used to visualize both repetitive sequences and individual genes in the human genome. Such new applications of labelled dead IsrB polypeptide nuclease and compositions, systems, thereof can be important in imaging cells and studying the functional nuclear architecture, especially in cases with a small nucleus volume or complex 3-D structures.

### Cell Selection

[0685] In one embodiment, the compositions, systems, and/or components thereof described herein can be used in a method to screen and/or select cells. In one embodiment, composition, system,-based screening/selection method can be used to identify diseased cells in a cell population. In one embodiment, selection of the cells results in a modification in the cells such that the selected cells die. In this way, diseased cells can be identified, and removed from the healthy cell population. In one embodiment, the diseased cells can be a cancer cell, pre-cancerous cell, a virus or other pathogenic organism infected cells, or otherwise abnormal cell. In one embodiment, the modification can impart another detectable change in the cells to be selected (e.g. a functional change and/or genomic barcode) that facilitates selection of the desired cells. In one embodiment a negative selection scheme can be used to obtain a desired cell population. In these embodiments, the cells to be selected against are modified, thus can be removed from the cell population based on their death or identification or sorting based the detectable change imparted on the cells. Thus, in these embodiments, the remaining cells after selection are the desired cell population.

[0686] In one embodiment, a method of selecting one or more cell(s) containing a polynucleotide modification can include: introducing one or more composition, system, (s) and/or components thereof, and/or vectors or vector systems into the cell(s), wherein the composition, system, (s) and/or components thereof, and/or vectors or vector systems contains and/or is capable of expressing one or more of: a IsrB polypeptide nuclease, an ωRNA sequence, and an recombination template; wherein, for example that which is being expressed is within and expressed in vivo by the composition, system, vector or vector system and/or the recombination template comprises the one or more mutations that abolish IsrB polypeptide nuclease nicking or cleavage; allowing homologous recombination of the recombination template with the target polynucleotide in the cell(s) to be selected; allowing a composition, system, or complex to bind to a target polynucleotide to effect cleavage of the target polynucleotide within said gene, wherein the AAV-complex comprises the IsrB polypeptide nuclease complexed with (1) the ωRNA that is hybridized to the target sequence within the target polynucleotide, and (2) the ωRNA scaffold, wherein binding of the complex to the target polynucleotide induces cell death or imparts some other detectable change to the cell, thereby allowing one or more cell(s) in which one or more mutations have been introduced to be selected. In one embodiment, the cell to be selected may be a eukaryotic cell. In one embodiment, the cell to be selected may be a prokaryotic cell. Selection of specific cells via the methods herein can be performed without requiring a selection marker or a two-step process that may include a counter-selection system.

### Therapeutic Agent Development

[0687] The compositions, systems, and components thereof described herein can be used to develop IscB polypeptide nuclease-based biologically active agents, such as small molecule therapeutics. Thus, described herein are methods for developing a biologically active agent that modulates a cell function and/or signaling event associated with a disease and/or disease gene. In one embodiment, the method comprises (a) contacting a test compound with a diseased cell and/or a cell containing a disease gene cell; and (b) detecting a change in a readout that is indicative of a reduction or an augmentation of a cell signaling event or other cell functionality associated with said disease or disease gene, thereby developing said biologically active agent that modulates said cell signaling event or other functionality associated with said disease gene. In one embodiment, the diseased cell is a model cell described elsewhere herein. In one embodiment, the diseased cell is a diseased cell isolated from a subject in need of treatment. In one embodiment, the test compound is a small molecule agent. In one embodiment, test compound is a small molecule agent. In one embodiment, the test compound is a biologic molecule agent.

[0688] In one embodiment, the method involves developing a therapeutic based on the composition, system, described herein. In one embodiment, the therapeutic comprises a IsrB polypeptide nuclease and/or a ωRNA with a reprogrammable spacer capable of hybridizing to a target sequence of interest. In one embodiment, the therapeutic is a vector or vector system that can contain a) a first regulatory element operably linked to a nucleotide sequence encoding the IsrB polypeptide nuclease; and b) a second regulatory element operably linked to one or more nucleotide sequences encoding one or more nucleic acid molecules comprising a ωRNA comprising a reprogrammable spacer sequence, a conserved RNA sequence; wherein components (a) and (b) are located on same or different vectors. In one embodiment, the biologically active agent is a composition comprising a delivery system operably configured to deliver composition, system, or components thereof, and/or or one or more polynucleotide sequences, vectors, or vector systems containing or encoding said components into a cell and capable of forming a complex with the components of the composition and system herein, and wherein said complex is operable in the cell. In one embodiment, the complex can include the IsrB polypeptide nuclease as described herein, ωRNA scaffold comprising the guide sequence (reprogrammable spacer sequence), and a conserved nucleotide sequence. In any such compositions, the delivery system can be a yeast system, a lipofection system, a microinjection system, a biolistic system, virosomes, liposomes, immunoliposomes, polycations, lipid: nucleic acid conjugates or artificial virions, or any other system as described herein. In one embodiment, the delivery is via a particle, a nanoparticle, a lipid or a cell penetrating peptide (CPP).

[0689] Also described herein are methods for developing or designing a composition, system, optionally a composition, system, based therapy or therapeutic, comprising (a) selecting for a (therapeutic) locus of interest ωRNA target sites, wherein said target sites have minimal sequence variation across a population, and from said selected target sites subselecting target sites, wherein a ωRNA directed against said target sites recognizes a minimal number of off-target sites across said population, or (b) selecting for a (therapeutic) locus of interest ωRNA target sites, wherein said target sites have minimal sequence variation across a population, or selecting for a (therapeutic) locus of interest ωRNA target sites, wherein a ωRNA directed against said target sites recognizes a minimal number of off-target sites across said population, and optionally estimating the number of (sub) selected target sites needed to treat or otherwise modulate or manipulate a population, and optionally validating one or more of the (sub) selected target sites for an individual subject, optionally designing one or more ωRNA recognizing one or more of said (sub) selected target sites.

[0690] In one embodiment, the method for developing or designing a ωRNA for use in a composition, system, optionally a composition, system, based therapy or therapeutic, can include (a) selecting for a (therapeutic) locus of interest ωRNA target sites, wherein said target sites have minimal sequence variation across a population, and from said selected target sites subselecting target sites, wherein a ωRNA directed against said target sites recognizes a minimal number of off-target sites across said population, or (b) selecting for a (therapeutic) locus of interest ωRNA target sites, wherein said target sites have minimal sequence variation across a population, or selecting for a (therapeutic) locus of interest ωRNA target sites, wherein a ωRNA directed against said target sites recognizes a minimal number of off-target sites across said population, and optionally estimating the number of (sub) selected target sites needed to treat or otherwise modulate or manipulate a population, optionally validating one or more of the (sub) selected target sites for an individual subject, optionally designing one or more ωRNA recognizing one or more of said (sub) selected target sites.

[0691] In one embodiment, thee method for developing or designing a composition, system, optionally a composition, system, based therapy or therapeutic in a population, can include (a) selecting for a (therapeutic) locus of interest reprogrammable spacer target sites, wherein said target sites have minimal sequence variation across a population, and from said selected target sites subselecting target sites, wherein a ωRNA directed against said target sites recognizes a minimal number of off-target sites across said population, or (b) selecting for a (therapeutic) locus of interest @ RNA reprogrammable spacer target sites, wherein said target sites have minimal sequence variation across a population, or selecting for a (therapeutic) locus of interest ωRNA reprogrammable spacer target sites, wherein a ωRNA directed against said target sites recognizes a minimal number of off-target sites across said population, and optionally estimating the number of (sub) selected target sites needed to treat or otherwise modulate or manipulate a population, optionally validating one or more of the (sub) selected target sites for an individual subject, optionally designing one or more ωRNA recognizing one or more of said (sub) selected target sites.

[0692] In one embodiment the method for developing or designing a ωRNA for use in a composition, system, optionally a composition, system, based therapy or therapeutic in a population, can include (a) selecting for a (therapeutic) locus of interest ωRNA target sites, wherein said target sites have minimal sequence variation across a population, and from said selected target sites subselecting target sites, wherein a ωRNA directed against said target sites recognizes a minimal number of off-target sites across said population, or (b) selecting for a (therapeutic) locus of interest ωRNA target sites, wherein said target sites have minimal sequence variation across a population, or selecting for a (therapeutic) locus of interest ωRNA target sites, wherein a ωRNA directed against said target sites recognizes a minimal number of off-target sites across said population, and optionally estimating the number of (sub) selected target sites needed to treat or otherwise modulate or manipulate a population, optionally validating one or more of the (sub) selected target sites for an individual subject, optionally designing one or more ωRNA reprogrammable spacer recognizing one or more of said (sub) selected target sites.

[0693] In one embodiment, the method for developing or designing a composition, system, such as a composition, system, based therapy or therapeutic, optionally in a population; or for developing or designing a ωRNA reprogrammable spacer for use in a composition, system, optionally a composition, system, based therapy or therapeutic, optionally in a population, can include selecting a set of target sequences for one or more loci in a target population, wherein the target sequences do not contain variants occurring above a threshold allele frequency in the target population (i.e. platinum target sequences); removing from said selected (platinum) target sequences any target sequences having high frequency off-target candidates (relative to other (platinum) targets in the set) to define a final target sequence set; preparing one or more, such as a set of compositions, systems, based on the final target sequence set, optionally wherein a number of composition prepared is based (at least in part) on the size of a target population.

[0694] In an embodiment, off-target candidates/off-targets, TAM restrictiveness, target cleavage efficiency, or effector protein specificity is identified or determined using a sequencing-based double-strand break (DSB) detection assay, such as described herein elsewhere. In an embodiment, off-target candidates/off-targets are identified or determined using a sequencing-based double-strand break (DSB) detection assay, such as described herein elsewhere. In an embodiment, off-targets, or off target candidates have at least 1, preferably 1-3, mismatches or (distal) TAM mismatches, such as 1 or more, such as 1, 2, 3, or more (distal) TAM mismatches. In an embodiment, sequencing-based DSB detection assay comprises labeling a site of a DSB with an adapter comprising a primer binding site, labeling a site of a DSB with a barcode or unique molecular identifier, or combination thereof, as described herein elsewhere.

[0695] It will be understood that the reprogrammable spacer sequence of the ωRNA is 100% complementary to the target site, i.e. does not comprise any mismatch with the target site. It will be further understood that “recognition” of an (off-) target site by a reprogrammable spacer presupposes composition, system, functionality, i.e. an (off-) target site is only recognized by a reprogrammable spacer RNA if binding of the reprogrammable spacer RNA to the (off-) target site leads to composition, system, activity (such as induction of single or double strand DNA cleavage, transcriptional modulation, etc.).

[0696] In an embodiment, the target sites having minimal sequence variation across a population are characterized by absence of sequence variation in at least 99%, preferably at least 99.9%, more preferably at least 99.99% of the population. In an embodiment, optimizing target location comprises selecting target sequences or loci having an absence of sequence variation in at least 99%, %, preferably at least 99.9%, more preferably at least 99.99% of a population. These targets are referred to herein elsewhere also as “platinum targets”. In an embodiment, said population comprises at least 1000 individuals, such as at least 5000 individuals, such as at least 10000 individuals, such as at least 50000 individuals.

[0697] In an embodiment, the off-target sites are characterized by at least one mismatch between the off-target site and the ωRNA. In an embodiment, the off-target sites are characterized by at most five, preferably at most four, more preferably at most three mismatches between the off-target site and the ωRNA. In an embodiment, the off-target sites are characterized by at least one mismatch between the off-target site and the ωRNA and by at most five, preferably at most four, more preferably at most three mismatches between the off-target site and the ωRNA.

[0698] In an embodiment, said minimal number of off-target sites across said population is determined for high-frequency haplotypes in said population. In an embodiment, said minimal number of off-target sites across said population is determined for high-frequency haplotypes of the off-target site locus in said population. In an embodiment, said minimal number of off-target sites across said population is determined for high-frequency haplotypes of the target site locus in said population. In an embodiment, the high-frequency haplotypes are characterized by occurrence in at least 0.1% of the population.

[0699] In an embodiment, the number of (sub) selected target sites needed to treat a population is estimated based on based low frequency sequence variation, such as low frequency sequence variation captured in large scale sequencing datasets. In an embodiment, the number of (sub) selected target sites needed to treat a population of a given size is estimated.

[0700] In an embodiment, the method further comprises obtaining genome sequencing data of a subject to be treated; and treating the subject with a composition, system, selected from the set of compositions, systems, wherein the composition, system, selected is based (at least in part) on the genome sequencing data of the individual. In an embodiment, the ((sub) selected) target is validated by genome sequencing, preferably whole genome sequencing.

[0701] In an embodiment, target sequences or loci as described herein are (further) selected based on optimization of one or more parameters, such as TAM type (natural or modified), TAM nucleotide content, TAM length, target sequence length, TAM restrictiveness, target cleavage efficiency, and target sequence position within a gene, a locus or other genomic region. Methods of optimization are discussed in greater detail elsewhere herein.

[0702] In an embodiment, target sequences or loci as described herein are (further) selected based on optimization of one or more of target loci location, target length, target specificity, and TAM characteristics. As used herein, TAM characteristics may comprise for instance TAM sequence, TAM length, and/or TAM GC contents. In an embodiment, optimizing TAM characteristics comprises optimizing nucleotide content of a TAM. In an embodiment, optimizing nucleotide content of TAM is selecting a TAM with a motif that maximizes abundance in the one or more target loci, minimizes mutation frequency, or both. Minimizing mutation frequency can for instance be achieved by selecting TAM sequences devoid of or having low or minimal CpG.

[0703] In an embodiment, the effector protein for each composition and system, in the set of compositions, systems, is selected based on optimization of one or more parameters selected from the group consisting of; effector protein size, ability of effector protein to access regions of high chromatin accessibility, degree of uniform enzyme activity across genomic targets, epigenetic tolerance, mismatch/budge tolerance, effector protein specificity, effector protein stability or half-life, effector protein immunogenicity or toxicity. Methods of optimization are discussed in greater detail elsewhere herein.

### Optimization of the Systems

[0704] The methods of the present invention can involve optimization of selected parameters or variables associated with the composition, system, and/or its functionality, as described herein further elsewhere. Optimization of the composition, system, in the methods as described herein may depend on the target(s), such as the therapeutic target or therapeutic targets, the mode or type of composition, system, modulation, such as composition, system, based therapeutic target(s) modulation, modification, or manipulation, as well as the delivery of the composition, system, components. One or more targets may be selected, depending on the genotypic and/or phenotypic outcome. For instance, one or more therapeutic targets may be selected, depending on (genetic) disease etiology or the desired therapeutic outcome. The (therapeutic) target(s) may be a single gene, locus, or other genomic site, or may be multiple genes, loci or other genomic sites. As is known in the art, a single gene, locus, or other genomic site may be targeted more than once, such as by use of multiple ωRNAs, or ωRNA scaffold and multiple reprogrammable spacers.

[0705] The activity of the composition and/or system, such as IsrB polypeptide nuclease-based therapy or therapeutics may involve target disruption, such as target mutation, such as leading to gene knockout. The activity of the composition and/or system, such as IscB polypeptide nuclease-based therapy or therapeutics may involve replacement of particular target sites, such as leading to target correction. IsrB polypeptide nuclease-based therapy or therapeutics may involve removal of particular target sites, such as leading to target deletion. The activity of the composition and/or system, such as IsrB polypeptide nuclease-based therapy or therapeutics may involve modulation of target site functionality, such as target site activity or accessibility, leading for instance to (transcriptional and/or epigenetic) gene or genomic region activation or gene or genomic region silencing. The skilled person will understand that modulation of target site functionality may involve IsrB polypeptide nuclease mutation (such as for instance generation of a catalytically inactive IsrB polypeptide nuclease) and/or functionalization (such as for instance fusion of the IsrB polypeptide nuclease with a heterologous functional domain, such as a transcriptional activator or repressor), as described herein elsewhere.

[0706] Accordingly, in an aspect, the invention relates to a method as described herein, comprising selection of one or more (therapeutic) target, selecting one or more functionality of the composition and/or system, and optimization of selected parameters or variables associated with the composition and/or its functionality. In a related aspect, the invention relates to a method as described herein, comprising (a) selecting one or more (therapeutic) target loci, (b) selecting one or more composition functionalities, (c) optionally selecting one or more modes of delivery, and preparing, developing, or designing a composition herein selected based on steps (a)-(c).

[0707] In an embodiment, the functionality of the composition and/or system comprises genomic mutation. In an embodiment, the functionality of the composition and/or system comprises single genomic mutation. In an embodiment, the functionality of the composition and/or system functionality comprises multiple genomic mutation. In an embodiment, the functionality of the composition and/or system comprises gene knockout. In an embodiment, the functionality of the composition and/or system comprises single gene knockout. In an embodiment, the functionality of the composition and/or system comprises multiple gene knockout. In an embodiment, the functionality of the composition and/or system comprises gene correction. In an embodiment, the functionality of the composition and/or system comprises single gene correction. In an embodiment, the functionality of the composition and/or system comprises multiple gene correction. In an embodiment, the functionality of the composition and/or system comprises genomic region correction. In an embodiment, the functionality of the composition and/or system comprises single genomic region correction. In an embodiment, the functionality of the composition and/or system comprises multiple genomic region correction. In an embodiment, the functionality of the composition and/or system comprises gene deletion. In an embodiment, the functionality of the composition and/or system comprises single gene deletion. In an embodiment, the functionality of the composition and/or system comprises multiple gene deletion. In an embodiment, the functionality of the composition and/or system comprises genomic region deletion. In an embodiment, the functionality of the composition and/or system comprises single genomic region deletion. In an embodiment, the functionality of the composition and/or system comprises multiple genomic region deletion. In an embodiment, the functionality of the composition and/or system comprises modulation of gene or genomic region functionality. In an embodiment, the functionality of the composition and/or system comprises modulation of single gene or genomic region functionality. In an embodiment, the functionality of the composition and/or system comprises modulation of multiple gene or genomic region functionality. In an embodiment, the functionality of the composition and/or system comprises gene or genomic region functionality, such as gene or genomic region activity. In an embodiment, the functionality of the composition and/or system comprises single gene or genomic region functionality, such as gene or genomic region activity. In an embodiment, the functionality of the composition and/or system comprises multiple gene or genomic region functionality, such as gene or genomic region activity. In an embodiment, the functionality of the composition and/or system comprises modulation gene activity or accessibility optionally leading to transcriptional and/or epigenetic gene or genomic region activation or gene or genomic region silencing. In an embodiment, the functionality of the composition and/or system comprises modulation single gene activity or accessibility optionally leading to transcriptional and/or epigenetic gene or genomic region activation or gene or genomic region silencing. In an embodiment, the functionality of the composition and/or system comprises modulation multiple gene activity or accessibility optionally leading to transcriptional and/or epigenetic gene or genomic region activation or gene or genomic region silencing.

[0708] Optimization of selected parameters or variables in the methods as described herein may result in optimized or improved the system, such as IsrB polypeptide nuclease-based therapy or therapeutic, specificity, efficacy, and/or safety. In an embodiment, one or more of the following parameters or variables are taken into account, are selected, or are optimized in the methods of the invention as described herein: IsrB polypeptide nuclease allosteric interactions, IsrB polypeptide nuclease functional domains and functional domain interactions, IsrB polypeptide nuclease specificity, hRNA specificity, composition specificity, TAM restrictiveness, TAM type (natural or modified), TAM nucleotide content, TAM length, IsrB polypeptide nuclease activity, hRNA activity, IsrB polypeptide nuclease/guide complex activity, target cleavage efficiency, target site selection, target sequence length, ability of effector protein to access regions of high chromatin accessibility, degree of uniform enzyme activity across genomic targets, epigenetic tolerance, mismatch/budge tolerance, IsrB polypeptide nuclease stability, IsrB polypeptide nuclease mRNA stability, ωRNA stability, IsrB polypeptide nuclease complex stability, IsrB polypeptide nuclease protein or mRNA immunogenicity or toxicity, ωRNA immunogenicity or toxicity, IsrB polypeptide nuclease immunogenicity or toxicity, IsrB polypeptide nuclease or mRNA dose or titer, ωRNA dose or titer, dose or titer, IsrB polypeptide nuclease protein size, IsrB polypeptide nuclease expression level, ωRNA expression level, IsrB polypeptide nuclease expression level, IsrB polypeptide nuclease spatiotemporal expression, ωRNA spatiotemporal expression, IsrB polypeptide nuclease/hRNA spatiotemporal expression.

[0709] By means of example, and without limitation, parameter or variable optimization may be achieved as follows. IsrB polypeptide nuclease specificity may be optimized by selecting the most specific IsrB polypeptide nuclease, e.g. IsrB polypeptide. This may be achieved for instance by selecting the most specific IsrB polypeptide nuclease orthologue or by specific IsrB polypeptide nuclease mutations which increase specificity. ωRNA specificity may be optimized by selecting the most specific ωRNA. This can be achieved for instance by selecting ωRNA having low homology, i.e. at least one or preferably more, such as at least 2, or preferably at least 3, mismatches to off-target sites. The specificity may be optimized by increasing IsrB polypeptide nuclease specificity and/or ωRNA specificity as above. TAM restrictiveness may be optimized by selecting a IsrB polypeptide nuclease having to most restrictive TAM recognition. This can be achieved for instance by selecting a IsrB polypeptide nuclease ortholog having more restrictive TAM recognition or by specific IsrB polypeptide mutations which increase or alter TAM restrictiveness. TAM type may be optimized for instance by selecting the appropriate IsrB polypeptide nuclease, such as the appropriate IsrB polypeptide nuclease recognizing a desired TAM type. The IsrB polypeptide nuclease or TAM type may be naturally occurring or may for instance be optimized based on IsrB polypeptide nuclease mutants having an altered TAM recognition, or TAM recognition repertoire. TAM nucleotide content may for instance be optimized by selecting the appropriate IsrB polypeptide nuclease, such as the appropriate IsrB nuclease recognizing a desired TAM nucleotide content. The IsrB polypeptide nuclease or TAM type may be naturally occurring or may for instance be optimized based on IsrB polypeptide nuclease mutants having an altered TAM recognition, or TAM recognition repertoire. TAM length may for instance be optimized by selecting the appropriate IsrB polypeptide nuclease, such as the appropriate IsrB polypeptide nuclease recognizing a desired TAM nucleotide length. The IsrB polypeptide nuclease or TAM type may be naturally occurring or may for instance be optimized based on IsrB polypeptide nuclease mutants having an altered TAM recognition, or TAM recognition repertoire.

[0710] Target length or target sequence length may be optimized, for instance, by selecting the appropriate IsrB polypeptide nuclease, such as the appropriate IsrB polypeptide nuclease recognizing a desired target or target sequence nucleotide length. Alternatively, or in addition, the target (sequence) length may be optimized by providing a target having a length deviating from the target (sequence) length typically associated with the IsrB polypeptide nuclease, such as the naturally occurring IsrB polypeptide nuclease. The IsrB polypeptide nuclease or target (sequence) length may be naturally occurring or may for instance be optimized based on IsrB polypeptide nuclease mutants having an altered target (sequence) length recognition, or target (sequence) length recognition repertoire. For instance, increasing or decreasing target (sequence) length may influence target recognition and/or off-target recognition. IsrB polypeptide nuclease activity may be optimized by selecting the most active IsrB polypeptide nuclease. This may be achieved for instance by selecting the most active IsrB polypeptide nuclease ortholog or by specific IsrB polypeptide nuclease mutations which increase activity. The ability of the IsrB polypeptide nuclease protein to access regions of high chromatin accessibility, may be optimized by selecting the appropriate IsrB polypeptide nuclease or mutant thereof, and can consider the size of the IsrB polypeptide nuclease, charge, or other dimensional variables etc. The degree of uniform IsrB polypeptide nuclease activity may be optimized by selecting the appropriate IsrB polypeptide nuclease or mutant thereof, and can consider IsrB polypeptide nuclease specificity and/or activity, TAM specificity, target length, mismatch tolerance, epigenetic tolerance, IsrB polypeptide nuclease and/or ωRNA stability and/or half-life, IsrB polypeptide nuclease and/or ωRNA immunogenicity and/or toxicity, etc. ωRNA activity may be optimized by selecting the most active @ RNA. In one embodiment, this can be achieved by increasing ωRNA stability through RNA modification. compositions activity may be optimized by increasing IsrB polypeptide nuclease activity and/or ωRNA activity as above.

[0711] The target site selection may be optimized by selecting the optimal position of the target site within a gene, locus or other genomic region. The target site selection may be optimized by optimizing target location comprises selecting a target sequence with a gene, locus, or other genomic region having low variability. This may be achieved for instance by selecting a target site in an early and/or conserved exon or domain (i.e. having low variability, such as polymorphisms, within a population).

[0712] In an embodiment, optimizing target (sequence) length comprises selecting a target sequence within one or more target loci between 5 and 25 nucleotides. In an embodiment, a target sequence is 20 nucleotides.

[0713] In an embodiment, optimizing target specificity comprises selecting targets loci that minimize off-target candidates.

[0714] In one embodiment, the target site may be selected by minimization of off-target effects (e.g. off-targets qualified as having 1-5, 1-4, or preferably 1-3 mismatches compared to target and/or having one or more TAM mismatches, such as distal TAM mismatches), preferably also considering variability within a population. IsrB polypeptide nuclease stability may be optimized by selecting IsrB polypeptide nuclease having appropriate half-life, such as preferably a short half-life while still capable of maintaining sufficient activity. In one embodiment, this can be achieved by selecting an appropriate IsrB polypeptide nuclease orthologue having a specific half-life or by specific IsrB polypeptide nuclease mutations or modifications which affect half-life or stability, such as inclusion (e.g. fusion) of stabilizing or destabilizing domains or sequences. IsrB polypeptide nuclease mRNA stability may be optimized by increasing or decreasing IsrB polypeptide nuclease mRNA stability. In one embodiment, this can be achieved by increasing or IsrB polypeptide nuclease mRNA stability through mRNA modification. hRNA stability may be optimized by increasing or decreasing ωRNA stability. In one embodiment, this can be achieved by increasing or decreasing ωRNA stability through RNA modification. The stability may be optimized by increasing or decreasing IsrB polypeptide nuclease stability and/or ωRNA stability as above. IsrB polypeptide nuclease protein or mRNA immunogenicity or toxicity may be optimized by decreasing IsrB polypeptide nuclease or mRNA immunogenicity or toxicity. In one embodiment, this can be achieved by mRNA or protein modifications. Similarly, in case of DNA based expression systems, DNA immunogenicity or toxicity may be decreased. ωRNA immunogenicity or toxicity may be optimized by decreasing hRNA immunogenicity or toxicity. In one embodiment, this can be achieved by ωRNA modifications. Similarly, in case of DNA based expression systems, DNA immunogenicity or toxicity may be decreased. The immunogenicity or toxicity may be optimized by decreasing IsrB polypeptide nuclease immunogenicity or toxicity and/or @ RNA immunogenicity or toxicity as above, or by selecting the least immunogenic or toxic IsrB polypeptide nuclease/hRNA combination. Similarly, in case of DNA based expression systems, DNA immunogenicity or toxicity may be decreased. IsrB polypeptide nuclease protein or mRNA dose or titer may be optimized by selecting dosage or titer to minimize toxicity and/or maximize specificity and/or efficacy. ωRNA dose or titer may be optimized by selecting dosage or titer to minimize toxicity and/or maximize specificity and/or efficacy. The composition dose or titer may be optimized by selecting dosage or titer to minimize toxicity and/or maximize specificity and/or efficacy. The IsrB polypeptide nuclease size may be optimized by selecting minimal protein size to increase efficiency of delivery, in particular for virus mediated delivery. IsrB polypeptide nuclease, ωRNA, or complex thereof expression level may be optimized by limiting (or extending) the duration of expression and/or limiting (or increasing) expression level. This may be achieved for instance by using self-inactivating compositions, systems, such as including a self-targeting (e.g. IsrB polypeptide nuclease targeting) ωRNA, by using viral vectors having limited expression duration, by using appropriate promoters for low (or high) expression levels, by combining different delivery methods for individual IsrB polypeptide system components, such as virus mediated delivery of IsrB polypeptide nuclease encoding nucleic acid combined with non-virus mediated delivery of ωRNA, or virus mediated delivery of ωRNA combined with non-virus mediated delivery of IsrB polypeptide nuclease or mRNA. IsrB polypeptide nuclease, ωRNA, or IsrB polypeptide complex spatiotemporal expression may be optimized by appropriate choice of conditional and/or inducible expression systems, including controllable IsrB polypeptide nuclease activity optionally a destabilized IsrB polypeptide nuclease and/or a split IsrB polypeptide nuclease, and/or cell- or tissue-specific expression systems.

[0715] In an aspect, the invention relates to a method as described herein, comprising selection of one or more (therapeutic) target, selecting the functionality of the composition and/or system, selecting composition mode of delivery, selecting composition delivery vehicle or expression system, and optimization of selected parameters or variables associated with the composition and/or its functionality, optionally wherein the parameters or variables are one or more selected from IsrB polypeptide nuclease specificity, ωRNA specificity, IsrB polypeptide complex specificity, TAM restrictiveness, TAM type (natural or modified), TAM nucleotide content, TAM length, IsrB polypeptide nuclease activity, ωRNA activity, IsrB polypeptide nuclease/hRNA complex activity, target cleavage efficiency, target site selection, target sequence length, ability of effector protein to access regions of high chromatin accessibility, degree of uniform enzyme activity across genomic targets, epigenetic tolerance, mismatch/budge tolerance, IsrB polypeptide nuclease stability, IsrB polypeptide nuclease mRNA stability, ωRNA stability, IsrB polypeptide complex stability, IsrB polypeptide nuclease protein or mRNA immunogenicity or toxicity, ωRNA immunogenicity or toxicity, IsrB polypeptide nuclease/ωRNA complex immunogenicity or toxicity, IsrB polypeptide nuclease protein or mRNA dose or titer, ωRNA dose or titer, IsrB polypeptide complex dose or titer, IsrB polypeptide nuclease protein size, IsrB polypeptide nuclease expression level, ωRNA expression level, IsrB polypeptide nuclease/@ RNA molecule complex expression level, IsrB polypeptide nuclease spatiotemporal expression, ωRNA spatiotemporal expression, IsrB polypeptide nuclease/@ RNA complex spatiotemporal expression.

[0716] It will be understood that the parameters or variables to be optimized as well as the nature of optimization may depend on the (therapeutic) target, the functionality of the composition and/or system, the system mode of delivery, and/or the composition delivery vehicle or expression system.

[0717] In an aspect, the invention relates to a method as described herein, comprising optimization of ωRNA specificity at the population level. Preferably, said optimization of ωRNA specificity comprises minimizing ωRNA target site sequence variation across a population and/or minimizing ωRNA off-target incidence across a population.

[0718] In one embodiment, optimization can result in selection of a IsrB polypeptide nuclease that is naturally occurring or is modified. In one embodiment, optimization can result in selection of a IsrB polypeptide nuclease that has nuclease, nickase, deaminase, transposase, and/or has one or more effector functionalities deactivated or eliminated. In one embodiment, optimizing a TAM specificity can include selecting a IsrB polypeptide nuclease with a modified TAM specificity. In one embodiment, optimizing can include selecting a IsrB polypeptide nuclease having a minimal size. In an embodiment, optimizing effector protein stability comprises selecting an effector protein having a short half-life while maintaining sufficient activity, such as by selecting an appropriate IsrB polypeptide nuclease orthologue having a specific half-life or stability. In an embodiment, optimizing immunogenicity or toxicity comprises minimizing effector protein immunogenicity or toxicity by protein modifications. In an embodiment, optimizing functional specific comprises selecting a protein effector with reduced tolerance of mismatches and/or bulges between the ωRNA and one or more target loci.

[0719] In an embodiment, optimizing efficacy comprises optimizing overall efficiency, epigenetic tolerance, or both. In an embodiment, maximizing overall efficiency comprises selecting an effector protein with uniform enzyme activity across target loci with varying chromatin complexity, selecting an effector protein with enzyme activity limited to areas of open chromatin accessibility. In an embodiment, chromatin accessibility is measured using one or more of ATAC-seq, or a DNA-proximity ligation assay. In an embodiment, optimizing epigenetic tolerance comprises optimizing methylation tolerance, epigenetic mark competition, or both. In an embodiment, optimizing methylation tolerance comprises selecting an effector protein that modify methylated DNA. In an embodiment, optimizing epigenetic tolerance comprises selecting an effector protein unable to modify silenced regions of a chromosome, selecting an effector protein able to modify silenced regions of a chromosome, or selecting target loci not enriched for epigenetic markers

[0720] In an embodiment, selecting an optimized ωRNA comprises optimizing ωRNA stability, ωRNA immunogenicity, or both, or other ωRNA associated parameters or variables as described herein elsewhere.

[0721] In an embodiment, optimizing ωRNA stability and/or ωRNA immunogenicity comprises RNA modification, or other ωRNA associated parameters or variables as described herein elsewhere. In an embodiment, the modification comprises removing 1-3 nucleotides form the 3′ end of a target complementarity region of the ωRNA. In an embodiment, modification comprises an extended @ RNA and/or trans RNA/DNA element that create stable structures in the ωRNA that compete with ωRNA base pairing at a target of off-target loci, or extended complimentary nucleotides between the ωRNA and target sequence, or both.

[0722] In an embodiment, the mode of delivery comprises delivering ωRNA and/or IsrB polypeptide nuclease, delivering @ RNA and/or IsrB polypeptide nuclease mRNA, or delivery ωRNA and/or IsrB polypeptide nuclease as a DNA based expression system. In an embodiment, the mode of delivery further comprises selecting a delivery vehicle and/or expression systems from the group consisting of liposomes, lipid particles, nanoparticles, biolistics, or viral-based expression/delivery systems. In an embodiment, expression is spatiotemporal expression is optimized by choice of conditional and/or inducible expression systems, including controllable IsrB polypeptide nuclease activity optionally a destabilized IsrB polypeptide polypeptide and/or a split IsrB polypeptide nuclease, and/or cell- or tissue-specific expression system.

[0723] The methods as described herein may further involve selection of the mode of delivery. In an embodiment, @ RNA and/or IsrB polypeptide nuclease are or are to be delivered. In an embodiment, ωRNA and/or IsrB polypeptide nuclease mRNA are or are to be delivered. In an embodiment, ωRNA and/or IsrB polypeptide nuclease provided in a DNA-based expression system are or are to be delivered. In an embodiment, delivery of the individual system components comprises a combination of the above modes of delivery. In an embodiment, delivery comprises delivering ωRNA and/or IsrB polypeptide nuclease protein, delivering ωRNA and/or IsrB polypeptide nuclease mRNA, or delivering ωRNA and/or IsrB polypeptide nuclease as a DNA based expression system.

[0724] The methods as described herein may further involve selection of the composition delivery vehicle and/or expression system. Delivery vehicles and expression systems are described herein elsewhere. By means of example, delivery vehicles of nucleic acids and/or proteins include nanoparticles, liposomes, etc. Delivery vehicles for DNA, such as DNA-based expression systems include for instance biolistics, viral based vector systems (e.g. adenoviral, AAV, lentiviral), etc. the skilled person will understand that selection of the mode of delivery, as well as delivery vehicle or expression system may depend on for instance the cell or tissues to be targeted. In an embodiment, the delivery vehicle and/or expression system for delivering the compositions, systems, or components thereof comprises liposomes, lipid particles, nanoparticles, biolistics, or viral-based expression/delivery systems.

### Considerations for Therapeutic Applications

[0725] A consideration in genome editing therapy is the choice of sequence-specific nuclease, such as a variant of a IsrB polypeptide nuclease. Each nuclease variant may possess its own unique set of strengths and weaknesses, many of which must be balanced in the context of treatment to maximize therapeutic benefit. For a specific editing therapy to be efficacious, a sufficiently high level of modification must be achieved in target cell populations to reverse disease symptoms. This therapeutic modification ‘threshold’ is determined by the fitness of edited cells following treatment and the amount of gene product necessary to reverse symptoms. With regard to fitness, editing creates three potential outcomes for treated cells relative to their unedited counterparts: increased, neutral, or decreased fitness. In the case of increased fitness, corrected cells may be able and expand relative to their diseased counterparts to mediate therapy. In this case, where edited cells possess a selective advantage, even low numbers of edited cells can be amplified through expansion, providing a therapeutic benefit to the patient. Where the edited cells possess no change in fitness, an increase the therapeutic modification threshold can be warranted. As such, significantly greater levels of editing may be needed to treat diseases, where editing creates a neutral fitness advantage, relative to diseases where editing creates increased fitness for target cells. If editing imposes a fitness disadvantage, as would be the case for restoring function to a tumor suppressor gene in cancer cells, modified cells would be outcompeted by their diseased counterparts, causing the benefit of treatment to be low relative to editing rates. This may be overcome with supplemental therapies to increase the potency and/or fitness of the edited cells relative to the diseased counterparts.

[0726] In addition to cell fitness, the amount of gene product necessary to treat disease can also influence the minimal level of therapeutic genome editing that can treat or prevent a disease or a symptom thereof. In cases where a small change in the gene product levels can result in significant changes in clinical outcome, the minimal level of therapeutic genome editing is less relative to cases where a larger change in the gene product levels are needed to gain a clinically relevant response. In one embodiment, the minimal level of therapeutic genome editing can range from 0.1 to 1%, 1-5%, 5-10%, 10-15%, 15-20%, 20-25%, 25-30%, 30-35%, 35-40%, 40-45%. 45-50%, or 50-55%. Thus, where a small change in gene product levels can influence clinical outcomes and diseases where there is a fitness advantage for edited cells, are ideal targets for genome editing therapy, as the therapeutic modification threshold is low enough to permit a high chance of success.

[0727] The activity of NHEJ and HDR DSB repair can vary by cell type and cell state. NHEJ is not highly regulated by the cell cycle and is efficient across cell types, allowing for high levels of gene disruption in accessible target cell populations. In contrast, HDR acts primarily during S/G2 phase, and is therefore restricted to cells that are actively dividing, limiting treatments that require precise genome modifications to mitotic cells [Ciccia, A. & Elledge, S. J. Molecular cell 40, 179-204 (2010); Chapman, J. R., et al. Molecular cell 47, 497-510 (2012)].

[0728] The efficiency of correction via HDR may be controlled by the epigenetic state or sequence of the targeted locus, or the specific repair template configuration (single vs. double stranded, long vs. short homology arms) used [Hacein-Bey-Abina, S., et al. The New England journal of medicine 346, 1185-1193 (2002); Gaspar, H. B., et al. Lancet 364, 2181-2187 (2004); Beumer, K. J., et al. G3 (2013)]. The relative activity of NHEJ and HDR machineries in target cells may also affect gene correction efficiency, as these pathways may compete to resolve DSBs [Beumer, K. J., et al. Proceedings of the National Academy of Sciences of the United States of America 105, 19821-19826 (2008)]. HDR also imposes a delivery challenge not seen with NHEJ strategies, as it uses the concurrent delivery of nucleases and repair templates. Thus, these differences can be kept in mind when designing, optimizing, and/or selecting a IscB polypeptide nuclease based therapeutic as described in greater detail elsewhere herein.

[0729] IsrB polypeptide nuclease-based polynucleotide modification application can include combinations of proteins, small RNA molecules, and/or repair templates, and can make, In one embodiment, delivery of these multiple parts substantially more challenging than, for example, traditional small molecule therapeutics. Two main strategies for delivery of compositions, systems, and components thereof have been developed: ex vivo and in vivo. In one embodiment of ex vivo treatments, diseased cells are removed from a subject, edited and then transplanted back into the patient. In other embodiments, cells from a healthy allogeneic donor are collected, modified using a composition or component thereof, to impart various functionalities and/or reduce immunogenicity, and administered to an allogeneic recipient in need of treatment. Ex vivo editing has the advantage of allowing the target cell population to be well defined and the specific dosage of therapeutic molecules delivered to cells to be specified. The latter consideration may be particularly important when off-target modifications are a concern, as titrating the amount of nuclease may decrease such mutations (Hsu et al., 2013). Another advantage of ex vivo approaches is the typically high editing rates that can be achieved, due to the development of efficient delivery systems for proteins and nucleic acids into cells in culture for research and gene therapy applications.

[0730] In vivo polynucleotide modification via compositions, systems, and/or components thereof involves direct delivery of the compositions, systems, and/or components thereof to cell types in their native tissues. In vivo polynucleotide modification via compositions, systems, and/or components thereof allows diseases in which the affected cell population is not amenable to ex vivo manipulation to be treated. Furthermore, delivering compositions, systems, and/or components thereof to cells in situ allows for the treatment of multiple tissue and cell types.

[0731] In one embodiment, such as those where viral vector systems are used to generate viral particles to deliver the composition and/or component thereof to a cell, the total cargo size of the composition and/or component thereof should be considered as vector systems can have limits on the size of a polynucleotide that can be expressed therefrom and/or packaged into cargo inside of a viral particle. In one embodiment, the tropism of a vector system, such as a viral vector system, should be considered as it can impact the cell type to which the composition or component thereof can be efficiently and/or effectively delivered.

[0732] When delivering a system or component thereof via a viral-based system, it can be important to consider the amount of viral particles that will be needed to achieve a therapeutic effect so as to account for the potential immune response that can be elicited by the viral particles when delivered to a subject or cell(s). When delivering a system or component thereof via a viral based system, it can be important to consider mechanisms of controlling the distribution and/or dosage of the system in vivo. Generally, to reduce the potential for off-target effects, it is optimal but not necessarily required, that the amount of the system be as close to the minimum or least effective dose. In practice this can be challenging to do.

[0733] In one embodiment, it can be important to consider the immunogenicity of the system or component thereof. In embodiments, where the immunogenicity of the system or component thereof is of concern, the immunogenicity system or component thereof can be reduced. By way of example only, the immunogenicity of the system or component thereof can be reduced using the approach set out in Tangri et al. Accordingly, directed evolution or rational design may be used to reduce the immunogenicity of the IsrB polypeptide nuclease in the host species (human or other species).

### Xenotransplantation

[0734] The present invention also contemplates use of the composition described herein, e.g. IsrB polypeptide nuclease protein systems, to provide RNA-guided DNA nucleases adapted to be used to provide modified tissues for transplantation. For example, RNA-guided DNA nucleases may be used to knockout, knockdown or disrupt selected genes in an animal, such as a transgenic pig (such as the human heme oxygenase-1 transgenic pig line), for example by disrupting expression of genes that encode epitopes recognized by the human immune system, i.e. xenoantigen genes. Candidate porcine genes for disruption may for example include α(1,3)-galactosyltransferase and cytidine monophosphate-N-acetylneuraminic acid hydroxylase genes (see PCT Patent Publication WO 2014/066505). In addition, genes encoding endogenous retroviruses may be disrupted, for example the genes encoding all porcine endogenous retroviruses (see Yang et al., 2015, Genome-wide inactivation of porcine endogenous retroviruses (PERVs), Science 27 Nov. 2015: Vol. 350 no. 6264 pp. 1101-1104). In addition, RNA-guided DNA nucleases may be used to target a site for integration of additional genes in xenotransplant donor animals, such as a human CD55 gene to improve protection against hyperacute rejection.

[0735] Embodiments of the invention also relate to methods and compositions related to knocking out genes, amplifying genes and repairing particular mutations associated with DNA repeat instability and neurological disorders (Robert D. Wells, Tetsuo Ashizawa, Genetic Instabilities and Neurological Diseases, Second Edition, Academic Press, Oct. 13, 2011-Medical). Specific aspects of tandem repeat sequences have been found to be responsible for more than twenty human diseases (New insights into repeat instability: role of RNA.DNA hybrids. McIvor E I, Polak U, Napierala M. RNA Biol. 2010 September-Oct; 7 (5): 551-8). The present effector protein systems may be harnessed to correct these defects of genomic instability.

[0736] Several further aspects of the invention relate to correcting defects associated with a wide range of genetic diseases which are further described on the website of the National Institutes of Health under the topic subsection Genetic Disorders (website at health.nih.gov/topic/GeneticDisorders). The genetic brain diseases may include but are not limited to Adrenoleukodystrophy, Agenesis of the Corpus Callosum, Aicardi Syndrome, Alpers' Disease, Alzheimer's Disease, Barth Syndrome, Batten Disease, CADASIL, Cerebellar Degeneration, Fabry's Disease, Gerstmann-Straussler-Scheinker Disease, Huntington's Disease and other Triplet Repeat Disorders, Leigh's Disease, Lesch-Nyhan Syndrome, Menkes Disease, Mitochondrial Myopathies and NINDS Colpocephaly. These diseases are further described on the website of the National Institutes of Health under the subsection Genetic Brain Disorders.

### Applications in Plants and Fungi

[0737] The compositions, systems, and methods described herein can be used to perform gene or genome interrogation or editing or manipulation in plants and fungi. For example, the applications include investigation and/or selection and/or interrogations and/or comparison and/or manipulations and/or transformation of plant genes or genomes; e.g., to create, identify, develop, optimize, or confer trait(s) or characteristic(s) to plant(s) or to transform a plant or fugus genome. There can accordingly be improved production of plants, new plants with new combinations of traits or characteristics or new plants with enhanced traits. The compositions, systems, and methods can be used with regard to plants in Site-Directed Integration (SDI) or Gene Editing (GE) or any Near Reverse Breeding (NRB) or Reverse Breeding (RB) techniques.

[0738] The compositions, systems, and methods herein may be used to confer desired traits (e.g., enhanced nutritional quality, increased resistance to diseases and resistance to biotic and abiotic stress, and increased production of commercially valuable plant products or heterologous compounds) on essentially any plants and fungi, and their cells and tissues. The compositions, systems, and methods may be used to modify endogenous genes or to modify their expression without the permanent introduction into the genome of any foreign gene.

[0739] In one embodiment, compositions, systems, and methods may be used in genome editing in plants or where RNAi or similar genome editing techniques have been used previously; see, e.g., Nekrasov, “Plant genome editing made easy: targeted mutagenesis in model and crop plants using the CRISPR-Cas system,” Plant Methods 2013, 9:39 (doi: 10.1186/1746-4811-9-39); Brooks, “Efficient gene editing in tomato in the first generation using the CRISPR-Cas9 system,” Plant Physiology September 2014 pp 114247577; Shan, “Targeted genome modification of crop plants using a CRISPR-Cas system,” Nature Biotechnology 31, 686-688 (2013); Feng, “Efficient genome editing in plants using a CRISPR/Cas system,” Cell Research (2013) 23:1229-1232. doi: 10.1038/cr.2013.114; published online 20 Aug. 2013; Xie, “RNA-guided genome editing in plants using a CRISPR-Cas system,” Mol Plant. 2013 November; 6 (6): 1975-83. doi: 10.1093/mp/sst119. Epub 2013 Aug. 17; Xu, “Gene targeting using the Agrobacterium tumefaciens-mediated CRISPR-Cas system in rice,” Rice 2014, 7:5 (2014), Zhou et al., “Exploiting SNPs for biallelic CRISPR mutations in the outcrossing woody perennial Populus reveals 4-coumarate: CoA ligase specificity and Redundancy,” New Phytologist (2015) (Forum) 1-4 (available online only at www.newphytologist.com); Caliando et al, “Targeted DNA degradation using a CRISPR device stably carried in the host genome, NATURE COMMUNICATIONS 6:6989, DOI: 10.1038/ncomms7989, www.nature.com/naturecommunications DOI: 10.1038/ncomms7989; U.S. Pat. No. 6,603,061-Agrobacterium-Mediated Plant Transformation Method; U.S. Pat. No. 7,868,149-Plant Genome Sequences and Uses Thereof and US 2009/0100536-Transgenic Plants with Enhanced Agronomic Traits, Morrell et al “Crop genomics: advances and applications,” Nat Rev Genet. 2011 Dec. 29; 13 (2): 85-96, all the contents and disclosure of each of which are herein incorporated by reference in their entirety. Aspects of utilizing the compositions, systems, and methods may be analogous to the use of the composition in plants, and mention is made of the University of Arizona website “CRISPR-PLANT” (genome.arizona.edu/crispr/) (supported by Penn State and AGI).

[0740] The compositions, systems, and methods may also be used on protoplasts. A “protoplast” refers to a plant cell that has had its protective cell wall completely or partially removed using, for example, mechanical or enzymatic means resulting in an intact biochemical competent unit of living plant that can reform their cell wall, proliferate and regenerate grow into a whole plant under proper growing conditions.

[0741] The compositions, systems, and methods may be used for screening genes (e.g., endogenous, mutations) of interest. In some examples, genes of interest include those encoding enzymes involved in the production of a component of added nutritional value or generally genes affecting agronomic traits of interest, across species, phyla, and plant kingdom. By selectively targeting e.g. genes encoding enzymes of metabolic pathways, the genes responsible for certain nutritional aspects of a plant can be identified. Similarly, by selectively targeting genes which may affect a desirable agronomic trait, the relevant genes can be identified. Accordingly, the present invention encompasses screening methods for genes encoding enzymes involved in the production of compounds with a particular nutritional value and/or agronomic traits.

[0742] It is also understood that reference herein to animal cells may also apply, mutatis mutandis, to plant or fungal cells unless otherwise apparent; and the enzymes herein having reduced off-target effects and systems employing such enzymes can be used in plant applications, including those mentioned herein.

[0743] In some cases, nucleic acids introduced to plants and fungi may be codon optimized for expression in the plants and fungi. Methods of codon optimization include those described in Kwon K C, et al., Codon Optimization to Enhance Expression Yields Insights into Chloroplast Translation, Plant Physiol. 2016 September; 172 (1): 62-77.

[0744] The components (e.g., IsrB polypeptide nuclease) in the compositions and systems may further comprise one or more functional domains described herein. In some examples, the functional domains may be an exonuclease. Such exonuclease may increase the efficiency of the IsrB polypeptide nuclease′ function, e.g., mutagenesis efficiency. An example of the functional domain is Trex2, in Weiss T et al., as described www.biorxiv.org/content/10.1101/2020.04.11.037572v1, doi:
[0745] doi.org/10.1101/2020.04.11.037572.

### Examples of Plants

[0746] The compositions, systems, and methods herein can be used to confer desired traits on essentially any plant. A wide variety of plants and plant cell systems may be engineered for the desired physiological and agronomic characteristics. In general, the term “plant” relates to any various photosynthetic, eukaryotic, unicellular or multicellular organism of the kingdom Plantae characteristically growing by cell division, containing chloroplasts, and having cell walls comprised of cellulose. The term plant encompasses monocotyledonous and dicotyledonous plants.

[0747] The compositions, systems, and methods may be used over a broad range of plants, such as for example with dicotyledonous plants belonging to the orders Magniolales, Illiciales, Laurales, Piperales, Aristochiales, Nymphaeales, Ranunculales, Papeverales, Sarraceniaceae, Trochodendrales, Hamamelidales, Eucomiales, Leitneriales, Myricales, Fagales, Casuarinales, Caryophyllales, Batales, Polygonales, Plumbaginales, Dilleniales, Theales, Malvales, Urticales, Lecythidales, Violales, Salicales, Capparales, Ericales, Diapensales, Ebenales, Primulales, Rosales, Fabales, Podostemales, Haloragales, Myrtales, Cornales, Proteales, San tales, Rafflesiales, Celastrales, Euphorbiales, Rhamnales, Sapindales, Juglandales, Geraniales, Polygalales, Umbellales, Gentianales, Polemoniales, Lamiales, Plantaginales, Scrophulariales, Campanulales, Rubiales, Dipsacales, and Asterales; monocotyledonous plants such as those belonging to the orders Alismatales, Hydrocharitales, Najadales, Triuridales, Commelinales, Eriocaulales, Restionales, Poales, Juncales, Cyperales, Typhales, Bromeliales, Zingiberales, Arecales, Cyclanthales, Pandanales, Arales, Lilliales, and Orchid ales, or with plants belonging to Gymnospermae, e.g., those belonging to the orders Pinales, Ginkgoales, Cycadales, Araucariales, Cupressales and Gnetales.

[0748] The compositions, systems, and methods herein can be used over a broad range of plant species, included in the non-limitative list of dicot, monocot or gymnosperm genera hereunder: Atropa, Alseodaphne, Anacardium, Arachis, Beilschmiedia, Brassica, Carthamus, Cocculus, Croton, Cucumis, Citrus, Citrullus, Capsicum, Catharanthus, Cocos, Coffea, Cucurbita, Daucus, Duguetia, Eschscholzia, Ficus, Fragaria, Glaucium, Glycine, Gossypium, Helianthus, Hevea, Hyoscyamus, Lactuca, Landolphia, Linum, Litsea, Lycopersicon, Lupinus, Manihot, Majorana, Malus, Medicago, Nicotiana, Olea, Parthenium, Papaver, Persea, Phaseolus, Pistacia, Pisum, Pyrus, Prunus, Raphanus, Ricinus, Senecio, Sinomenium, Stephania, Sinapis, Solanum, Theobroma, Trifolium, Trigonella, Vicia, Vinca, Vilis, and Vigna; and the genera Allium, Andropogon, Aragrostis, Asparagus, Avena, Cynodon, Elaeis, Festuca, Festulolium, Heterocallis, Hordeum, Lemna, Lolium, Musa, Oryza, Panicum, Pannesetum, Phleum, Poa, Secale, Sorghum, Triticum, Zea, Abies, Cunninghamia, Ephedra, Picea, Pinus, and Pseudotsuga.

[0749] In one embodiment, target plants and plant cells for engineering include those monocotyledonous and dicotyledonous plants, such as crops including grain crops (e.g., wheat, maize, rice, millet, barley), fruit crops (e.g., tomato, apple, pear, strawberry, orange), forage crops (e.g., alfalfa), root vegetable crops (e.g., carrot, potato, sugar beets, yam), leafy vegetable crops (e.g., lettuce, spinach); flowering plants (e.g., petunia, rose, chrysanthemum), conifers and pine trees (e.g., pine fir, spruce); plants used in phytoremediation (e.g., heavy metal accumulating plants); oil crops (e.g., sunflower, rape seed) and plants used for experimental purposes (e.g., Arabidopsis). Specifically, the plants are intended to comprise without limitation angiosperm and gymnosperm plants such as acacia, alfalfa, amaranth, apple, apricot, artichoke, ash tree, asparagus, avocado, banana, barley, beans, beet, birch, beech, blackberry, blueberry, broccoli, Brussel's sprouts, cabbage, canola, cantaloupe, carrot, cassava, cauliflower, cedar, a cereal, celery, chestnut, cherry, Chinese cabbage, citrus, clementine, clover, coffee, corn, cotton, cowpea, cucumber, cypress, eggplant, elm, endive, eucalyptus, fennel, figs, fir, geranium, grape, grapefruit, groundnuts, ground cherry, gum hemlock, hickory, kale, kiwifruit, kohlrabi, larch, lettuce, leek, lemon, lime, locust, pine, maidenhair, maize, mango, maple, melon, millet, mushroom, mustard, nuts, oak, oats, oil palm, okra, onion, orange, an ornamental plant or flower or tree, papaya, palm, parsley, parsnip, pea, peach, peanut, pear, peat, pepper, persimmon, pigeon pea, pine, pineapple, plantain, plum, pomegranate, potato, pumpkin, radicchio, radish, rapeseed, raspberry, rice, rye, sorghum, safflower, sallow, soybean, spinach, spruce, squash, strawberry, sugar beet, sugarcane, sunflower, sweet potato, sweet corn, tangerine, tea, tobacco, tomato, trees, triticale, turf grasses, turnips, vine, walnut, watercress, watermelon, wheat, yams, yew, and zucchini.

[0750] The term plant also encompasses Algae, which are mainly photoautotrophs unified primarily by their lack of roots, leaves and other organs that characterize higher plants. The compositions, systems, and methods can be used over a broad range of “algae” or “algae cells.” Examples of algae include eukaryotic phyla, including the Rhodophyta (red algae), Chlorophyta (green algae), Phaeophyta (brown algae), Bacillariophyta (diatoms), Eustigmatophyta and dinoflagellates as well as the prokaryotic phylum Cyanobacteria (blue-green algae). Examples of algae species include those of Amphora, Anabaena, Anikstrodesmis, Botryococcus, Chaetoceros, Chlamydomonas, Chlorella, Chlorococcum, Cyclotella, Cylindrotheca, Dunaliella, Emiliana, Euglena, Hematococcus, Isochrysis, Monochrysis, Monoraphidium, Nannochloris, Nannnochloropsis, Navicula, Nephrochloris, Nephroselmis, Nitzschia, Nodularia, Nostoc, Oochromonas, Oocystis, Oscillartoria, Pavlova, Phaeodactylum, Playtmonas, Pleurochrysis, Porhyra, Pseudoanabaena, Pyramimonas, Stichococcus, Synechococcus, Synechocystis, Tetraselmis, Thalassiosira, and Trichodesmium.

### Plant Promoters

[0751] In order to ensure appropriate expression in a plant cell, the components of the components and systems herein may be placed under control of a plant promoter. A plant promoter is a promoter operable in plant cells. A plant promoter is capable of initiating transcription in plant cells, whether or not its origin is a plant cell. The use of different types of promoters is envisaged.

[0752] In some examples, the plant promoter is a constitutive plant promoter, which is a promoter that is able to express the open reading frame (ORF) that it controls in all or nearly all of the plant tissues during all or nearly all developmental stages of the plant (referred to as “constitutive expression”). One example of a constitutive promoter is the cauliflower mosaic virus 35S promoter. In some examples, the plant promoter is a regulated promoter, which directs gene expression not constitutively, but in a temporally- and/or spatially-regulated manner, and includes tissue-specific, tissue-preferred and inducible promoters. Different promoters may direct the expression of a gene in different tissues or cell types, or at different stages of development, or in response to different environmental conditions. In some examples, the plant promoter is a tissue-preferred promoters, which can be utilized to target enhanced expression in certain cell types within a particular plant tissue, for instance vascular cells in leaves or roots or in specific cells of the seed.

[0753] Exemplary plant promoters include those obtained from plants, plant viruses, and bacteria such as Agrobacterium or Rhizobium which comprise genes expressed in plant cells. Additional examples of promoters include those described in Kawamata et al., (1997) Plant Cell Physiol 38:792-803; Yamamoto et al., (1997) Plant J 12:255-65; Hire et al, (1992) Plant Mol Biol 20:207-18, Kuster et al, (1995) Plant Mol Biol 29:759-72, and Capana et al., (1994) Plant Mol Biol 25:681-91.

[0754] In some examples, a plant promoter may be an inducible promoter, which is inducible and allows for spatiotemporal control of gene editing or gene expression may use a form of energy. The form of energy may include sound energy, electromagnetic radiation, chemical energy and/or thermal energy. Examples of inducible systems include tetracycline inducible promoters (Tet-On or Tet-Off), small molecule two-hybrid transcription activations systems (FKBP, ABA, etc.), or light inducible systems (Phytochrome, LOV domains, or cryptochrome), such as a Light Inducible Transcriptional Effector (LITE) that direct changes in transcriptional activity in a sequence-specific manner. In a particular example, of the components of a light inducible system include a IscB polypeptide nuclease, a light-responsive cytochrome heterodimer (e.g. from Arabidopsis thaliana), and a transcriptional activation/repression domain.

[0755] In some examples, the promoter may be a chemical-regulated promotor (where the application of an exogenous chemical induces gene expression) or a chemical-repressible promoter (where application of the chemical represses gene expression). Examples of chemical-inducible promoters include maize In2-2 promoter (activated by benzene sulfonamide herbicide safeners), the maize GST promoter (activated by hydrophobic electrophilic compounds used as pre-emergent herbicides), the tobacco PR-1 a promoter (activated by salicylic acid), promoters regulated by antibiotics (such as tetracycline-inducible and tetracycline-repressible promoters).

### Stable Integration in the Genome of Plants

[0756] In one embodiment, polynucleotides encoding the components of the compositions and systems may be introduced for stable integration into the genome of a plant cell. In some cases, vectors or expression systems may be used for such integration. The design of the vector or the expression system can be adjusted depending on for when, where and under what conditions the guide RNA and/or the IsrB polypeptide nuclease gene are expressed. In some cases, the polynucleotides may be integrated into an organelle of a plant, such as a plastid, mitochondrion or a chloroplast. The elements of the expression system may be on one or more expression constructs which are either circular such as a plasmid or transformation vector, or non-circular such as linear double stranded DNA.

[0757] In one embodiment, the method of integration generally comprises the steps of selecting a suitable host cell or host tissue, introducing the construct(s) into the host cell or host tissue, and regenerating plant cells or plants therefrom. In some examples, the expression system for stable integration into the genome of a plant cell may contain one or more of the following elements: a promoter element that can be used to express the RNA and/or IsrB polypeptide nuclease in a plant cell; a 5′ untranslated region to enhance expression; an intron element to further enhance expression in certain cells, such as monocot cells; a multiple-cloning site to provide convenient restriction sites for inserting the guide RNA and/or the IsrB polypeptide nuclease gene sequences and other desired elements; and a 3′ untranslated region to provide for efficient termination of the expressed transcript.

### Transient Expression in Plants

[0758] In one embodiment, the components of the compositions and systems may be transiently expressed in the plant cell. In some examples, the compositions and systems may modify a target nucleic acid only when both the ωRNA and the IsrB polypeptide nuclease are present in a cell, such that genomic modification can further be controlled. As the expression of the IsrB polypeptide nuclease is transient, plants regenerated from such plant cells typically contain no foreign DNA. In certain examples, the IsrB polypeptide is stably expressed and the guide sequence is transiently expressed.

[0759] DNA and/or RNA (e.g., mRNA) may be introduced to plant cells for transient expression. In such cases, the introduced nucleic acid may be provided in sufficient quantity to modify the cell but do not persist after a contemplated period of time has passed or after one or more cell divisions.

[0760] The transient expression may be achieved using suitable vectors. Exemplary vectors that may be used for transient expression include a PEAQ vector (may be tailored for Agrobacterium-mediated transient expression) and Cabbage Leaf Curl virus (CaLCuV), and vectors described in Sainsbury F. et al., Plant Biotechnol J. 2009 September; 7 (7): 682-93; and Yin K et al., Scientific Reports volume 5, Article number: 14926 (2015).

[0761] Combinations of the different methods described above are also envisaged.

Translocation to and/or Expression in Specific Plant Organelles

[0762] The compositions and systems herein may comprise elements for translocation to and/or expression in a specific plant organelle.

### Chloroplast Targeting

[0763] In one embodiment, it is envisaged that the compositions and systems are used to specifically modify chloroplast genes or to ensure expression in the chloroplast. The compositions and systems (e.g., IsrB polypeptide nuclease, ωRNAs, or their encoding polynucleotides) may be transformed, compartmentalized, and/or targeted to the chloroplast. In an example, the introduction of genetic modifications in the plastid genome can reduce biosafety issues such as gene flow through pollen.

[0764] Examples of methods of chloroplast transformation include Particle bombardment, PEG treatment, and microinjection, and the translocation of transformation cassettes from the nuclear genome to the plastid. In some examples, targeting of chloroplasts may be achieved by incorporating in chloroplast localization sequence, and/or the expression construct a sequence encoding a chloroplast transit peptide (CTP) or plastid transit peptide, operably linked to the 5′ region of the sequence encoding the components of the compositions and systems. Additional examples of transforming, targeting and localization of chloroplasts include those described in WO2010061186, Protein Transport into Chloroplasts, 2010, Annual Review of Plant Biology, Vol. 61:157-180, and US20040142476, which are incorporated by reference herein in their entireties.

### Exemplary Applications in Plants

[0765] The compositions, systems, and methods may be used to generate genetic variation(s) in a plant (e.g., crop) of interest. One or more, e.g., a library of, ωRNAs targeting one or more locations in a genome may be provided and introduced into plant cells together with the IsrB polypeptide nuclease. For example, a collection of genome-scale point mutations and gene knock-outs can be generated. In some examples, the compositions, systems, and methods may be used to generate a plant part or plant from the cells so obtained and screening the cells for a trait of interest. The target genes may include both coding and non-coding regions. In some cases, the trait is stress tolerant and the method is a method for the generation of stress-tolerant crop varieties.

[0766] In one embodiment, the compositions, systems, and methods are used to modify endogenous genes or to modify their expression. The expression of the components may induce targeted modification of the genome, either by direct activity of the IsrB polypeptide nuclease and optionally introduction of recombination template DNA, or by modification of genes targeted. The different strategies described herein above allow IsrB polypeptide nuclease-mediated targeted genome editing without requiring the introduction of the components into the plant genome.

[0767] In some cases, the modification may be performed without the permanent introduction into the genome of the plant of any foreign gene, including those encoding components of the composition herein, so as to avoid the presence of foreign DNA in the genome of the plant. This can be of interest as the regulatory requirements for non-transgenic plants are less rigorous. Components which are transiently introduced into the plant cell are typically removed upon crossing.

[0768] For example, the modification may be performed by transient expression of the components of the compositions and systems. The transient expression may be performed by delivering the components of the compositions and systems with viral vectors, delivery into protoplasts, with the aid of particulate molecules such as nanoparticles or CPPs.

Generation of Plants with Desired Traits

[0769] The compositions, systems, and methods herein may be used to introduce desired traits to plants. The approaches include introduction of one or more foreign genes to confer a trait of interest, editing or modulating endogenous genes to confer a trait of interest.

### Agronomic Traits

[0770] In one embodiment, crop plants can be improved by influencing specific plant traits. Examples of the traits include improved agronomic traits such as herbicide resistance, disease resistance, abiotic stress tolerance, high yield, and superior quality, pesticide-resistance, disease resistance, insect and nematode resistance, resistance against parasitic weeds, drought tolerance, nutritional value, stress tolerance, self-pollination voidance, forage digestibility biomass, and grain yield.

[0771] In one embodiment, genes that confer resistance to pests or diseases may be introduced to plants. In cases there are endogenous genes that confer such resistance in plants, their expression and function may be enhanced (e.g., by introducing extra copies, modifications that enhance expression and/or activity).

[0772] Examples of genes that confer resistance include plant disease resistance genes (e.g., Cf-9, Pto, RSP2, SIDMR6-1), genes conferring resistance to a pest (e.g., those described in WO96/30517), Bacillus thuringiensis proteins, lectins, Vitamin-binding proteins (e.g., avidin), enzyme inhibitors (e.g., protease or proteinase inhibitors or amylase inhibitors), insect-specific hormones or pheromones (e.g., ecdysteroid or a juvenile hormone, variant thereof, a mimetic based thereon, or an antagonist or agonist thereof) or genes involved in the production and regulation of such hormone and pheromones, insect-specific peptides or neuropeptide, Insect-specific venom (e.g., produced by a snake, a wasp, etc., or analog thereof), Enzymes responsible for a hyperaccumulation of a monoterpene, a sesquiterpene, a steroid, hydroxamic acid, a phenylpropanoid derivative or another nonprotein molecule with insecticidal activity, Enzymes involved in the modification of biologically active molecule (e.g., a glycolytic enzyme, a proteolytic enzyme, a lipolytic enzyme, a nuclease, a cyclase, a transaminase, an esterase, a hydrolase, a phosphatase, a kinase, a phosphorylase, a polymerase, an elastase, a chitinase and a glucanase, whether natural or synthetic), molecules that stimulates signal transduction, Viral-invasive proteins or a complex toxin derived therefrom, Developmental-arrestive proteins produced in nature by a pathogen or a parasite, a developmental-arrestive protein produced in nature by a plant, or any combination thereof.

[0773] The compositions, systems, and methods may be used to identify, screen, introduce or remove mutations or sequences lead to genetic variability that give rise to susceptibility to certain pathogens, e.g., host specific pathogens. Such approach may generate plants that are non-host resistance, e.g., the host and pathogen are incompatible or there can be partial resistance against all races of a pathogen, typically controlled by many genes and/or also complete resistance to some races of a pathogen but not to other races.

[0774] In one embodiment, the compositions, systems, and methods may be used to modify genes involved in plant diseases. Such genes may be removed, inactivated, or otherwise regulated or modified. Examples of plant diseases include those described in [0045]-[0080] of US20140213619A1, which is incorporated by reference herein in its entirety.

[0775] In one embodiment, genes that confer resistance to herbicides may be introduced to plants. Examples of genes that confer resistance to herbicides include genes conferring resistance to herbicides that inhibit the growing point or meristem, such as an imidazolinone or a sulfonylurea, genes conferring glyphosate tolerance (e.g., resistance conferred by, e.g., mutant 5-enolpyruvylshikimate-3-phosphate synthase genes, aroA genes and glyphosate acetyl transferase (GAT) genes, respectively), or resistance to other phosphono compounds such as by glufosinate (phosphinothricin acetyl transferase (PAT) genes from Streptomyces species, including Streptomyces hygroscopicus and Streptomyces viridichromogenes), and to pyridinoxy or phenoxy proprionic acids and cyclohexones by ACCase inhibitor-encoding genes), genes conferring resistance to herbicides that inhibit photosynthesis (such as a triazine (psbA and gs+ genes) or a benzonitrile (nitrilase gene), and glutathione S-transferase), genes encoding enzymes detoxifying the herbicide or a mutant glutamine synthase enzyme that is resistant to inhibition, genes encoding a detoxifying enzyme is an enzyme encoding a phosphinothricin acetyltransferase (such as the bar or pat protein from Streptomyces species), genes encoding hydroxyphenylpyruvatedioxygenases (HPPD) inhibitors, e.g., naturally occurring HPPD resistant enzymes, and genes encoding a mutated or chimeric HPPD enzyme.

[0776] In one embodiment, genes involved in Abiotic stress tolerance may be introduced to plants. Examples of genes include those capable of reducing the expression and/or the activity of poly (ADP-ribose) polymerase (PARP) gene, transgenes capable of reducing the expression and/or the activity of the PARG encoding genes, genes coding for a plant-functional enzyme of the nicotineamide adenine dinucleotide salvage synthesis pathway including nicotinamidase, nicotinate phosphoribosyltransferase, nicotinic acid mononucleotide adenyl transferase, nicotinamide adenine dinucleotide synthetase or nicotine amide phosphorybosyltransferase, enzymes involved in carbohydrate biosynthesis, enzymes involved in the production of polyfructose (e.g., the inulin and levan-type), the production of alpha-1,6 branched alpha-1,4-glucans, the production of alternan, the production of hyaluronan.

[0777] In one embodiment, genes that improve drought resistance may be introduced to plants. Examples of genes Ubiquitin Protein Ligase protein (UPL) protein (UPL3), DR02, DR03, ABC transporter, and DREB1A.

### Nutritionally Improved Plants

[0778] In one embodiment, the compositions, systems, and methods may be used to produce nutritionally improved plants. In some examples, such plants may provide functional foods, e.g., a modified food or food ingredient that may provide a health benefit beyond the traditional nutrients it contains. In certain examples, such plants may provide nutraceuticals foods, e.g., substances that may be considered a food or part of a food and provides health benefits, including the prevention and treatment of disease. The nutraceutical foods may be useful in the prevention and/or treatment of diseases in animals and humans, e.g., cancers, diabetes, cardiovascular disease, and hypertension.

[0779] An improved plant may naturally produce one or more desired compounds and the modification may enhance the level or activity or quality of the compounds. In some cases, the improved plant may not naturally produce the compound(s), while the modification enables the plant to produce such compound(s). In some cases, the compositions, systems, and methods used to modify the endogenous synthesis of these compounds indirectly, e.g. by modifying one or more transcription factors that controls the metabolism of this compound.

[0780] Examples of nutritionally improved plants include plants comprising modified protein quality, content and/or amino acid composition, essential amino acid contents, oils and fatty acids, carbohydrates, vitamins and carotenoids, functional secondary metabolites, and minerals. In some examples, the improved plants may comprise or produce compounds with health benefits. Examples of nutritionally improved plants include those described in Newell-McGloughlin, Plant Physiology, July 2008, Vol. 147, pp. 939-953.

[0781] Examples of compounds that can be produced include carotenoids (e.g., α-Carotene or β-Carotene), lutein, lycopene, Zeaxanthin, Dietary fiber (e.g., insoluble fibers, β-Glucan, soluble fibers, fatty acids (e.g., ω-3 fatty acids, Conjugated linoleic acid, GLA,), Flavonoids (e.g., Hydroxycinnamates, flavonols, catechins and tannins), Glucosinolates, indoles, isothiocyanates (e.g., Sulforaphane), Phenolics (e.g., stilbenes, caffeic acid and ferulic acid, epicatechin), Plant stanols/sterols, Fructans, inulins, fructo-oligosaccharides, Saponins, Soybean proteins, Phytoestrogens (e.g., isoflavones, lignans), Sulfides and thiols such as diallyl sulphide, Allyl methyl trisulfide, dithiolthiones, Tannins, such as proanthocyanidins, or any combination thereof.

[0782] The compositions, systems, and methods may also be used to modify protein/starch functionality, shelf life, taste/aesthetics, fiber quality, and allergen, antinutrient, and toxin reduction traits.

[0783] Examples of genes and nucleic acids that can be modified to introduce the traits include stearyl-ACP desaturase, DNA associated with the single allele which may be responsible for maize mutants characterized by low levels of phytic acid, Tf RAP2.2 and its interacting partner SINAT2, Tf Dof1, and DOF Tf AtDof1.1 (OBP2).

### Modification of Polyploid Plants

[0784] The compositions, systems, and methods may be used to modify polyploid plants. Polyploid plants carry duplicate copies of their genomes (e.g. as many as six, such as in wheat). In some cases, the compositions, systems, and methods may be/can be multiplexed to affect all copies of a gene, or to target dozens of genes at once. For instance, the compositions, systems, and methods may be used to simultaneously ensure a loss of function mutation in different genes responsible for suppressing defenses against a disease. The modification may be simultaneous suppression the expression of the TaMLO-A1, TaMLO-B1 and TaMLO-D1 nucleic acid sequence in a wheat plant cell and regenerating a wheat plant therefrom, in order to ensure that the wheat plant is resistant to powdery mildew (e.g., as described in WO2015109752).

### Regulation of Fruit-Ripening

[0785] The compositions, systems, and methods may be used to regulate ripening of fruits. Ripening is a normal phase in the maturation process of fruits and vegetables. Only a few days after it starts it may render a fruit or vegetable inedible, which can bring significant losses to both farmers and consumers.

[0786] In one embodiment, the compositions, systems, and methods are used to reduce ethylene production. In some examples, the compositions, systems, and methods may be used to suppress the expression and/or activity of ACC synthase, insert a ACC deaminase gene or a functional fragment thereof, insert a SAM hydrolase gene or functional fragment thereof, suppress ACC oxidase gene expression

[0787] Alternatively or additionally, the compositions, systems, and methods may be used to modify ethylene receptors (e.g., suppressing ETR1) and/or Polygalacturonase (PG). Suppression of a gene may be achieved by introducing a mutation, an antisense sequence, and/or a truncated copy of the gene to the genome.

### Increasing Storage Life of Plants

[0788] In one embodiment, the compositions, systems, and methods are used to modify genes involved in the production of compounds which affect storage life of the plant or plant part. The modification may be in a gene that prevents the accumulation of reducing sugars in potato tubers. Upon high-temperature processing, these reducing sugars react with free amino acids, resulting in brown, bitter-tasting products and elevated levels of acrylamide, which is a potential carcinogen. In one embodiment, the methods provided herein are used to reduce or inhibit expression of the vacuolar invertase gene (VInv), which encodes a protein that breaks down sucrose to glucose and fructose.

### Reducing Allergens in Plants

[0789] In one embodiment, the compositions, systems, and methods are used to generate plants with a reduced level of allergens, making them safer for consumers. To this end, the compositions, systems, and methods may be used to identify and modify (e.g., suppress) one or more genes responsible for the production of plant allergens. Examples of such genes include Lol p5, as well as those in peanuts, soybeans, lentils, peas, lupin, green beans, mung beans, such as those described in Nicolaou et al., Current Opinion in Allergy and Clinical Immunology 2011; 11 (3): 222), which is incorporated by reference herein in its entirety.

### Generation of Male Sterile Plants

[0790] The compositions, systems, and methods may be used to generate male sterile plants. Hybrid plants typically have advantageous agronomic traits compared to inbred plants. However, for self-pollinating plants, the generation of hybrids can be challenging. In different plant types (e.g., maize and rice), genes have been identified which are important for plant fertility, more particularly male fertility. Plants that are as such genetically altered can be used in hybrid breeding programs.

[0791] The compositions, systems, and methods may be used to modify genes involved male fertility, e.g., inactivating (such as by introducing mutations to) genes required for male fertility. Examples of the genes involved in male fertility include cytochrome P450-like gene (MS26) or the meganuclease gene (MS45), and those described in Wan X et al., Mol Plant. 2019 Mar. 4; 12 (3): 321-342; and Kim Y J, et al., Trends Plant Sci. 2018 January; 23 (1): 53-65.

### Increasing the Fertility Stage in Plants

[0792] In one embodiment, the compositions, systems, and methods may be used to prolong the fertility stage of a plant such as of a rice. For instance, a rice fertility stage gene such as Ehd3 can be targeted in order to generate a mutation in the gene and plantlets can be selected for a prolonged regeneration plant fertility stage.

### Production of Early Yield of Products

[0793] In one embodiment, the compositions, systems, and methods may be used to produce early yield of the product. For example, flowering process may be modulated, e.g., by mutating flowering repressor gene such as SP5G. Examples of such approaches include those described in Soyk S, et al., Nat Genet. 2017 January; 49 (1): 162-168.

### Oil and Biofuel Production

[0794] The compositions, systems, and methods may be used to generate plants for oil and biofuel production. Biofuels include fuels made from plant and plant-derived resources. Biofuels may be extracted from organic matter whose energy has been obtained through a process of carbon fixation or are made through the use or conversion of biomass. This biomass can be used directly for biofuels or can be converted to convenient energy containing substances by thermal conversion, chemical conversion, and biochemical conversion. This biomass conversion can result in fuel in solid, liquid, or gas form. Biofuels include bioethanol and biodiesel. Bioethanol can be produced by the sugar fermentation process of cellulose (starch), which may be derived from maize and sugar cane. Biodiesel can be produced from oil crops such as rapeseed, palm, and soybean. Biofuels can be used for transportation.

### Generation of Plants for Production of Vegetable Oils and Biofuels

[0795] The compositions, systems, and methods may be used to generate algae (e.g., diatom) and other plants (e.g., grapes) that express or overexpress high levels of oil or biofuels.

[0796] In some cases, the compositions, systems, and methods may be used to modify genes involved in the modification of the quantity of lipids and/or the quality of the lipids. Examples of such genes include those involved in the pathways of fatty acid synthesis, e.g., acetyl-CoA carboxylase, fatty acid synthase, 3-ketoacyl_acyl-carrier protein synthase III, glycerol-3-phospate deshydrogenase (G3PDH), Enoyl-acyl carrier protein reductase (Enoyl-ACP-reductase), glycerol-3-phosphate acyltransferase, lysophosphatidic acyl transferase or diacylglycerol acyltransferase, phospholipid: diacylglycerol acyltransferase, phoshatidate phosphatase, fatty acid thioesterase such as palmitoyi protein thioesterase, or malic enzyme activities.

[0797] In further embodiments, it is envisaged to generate diatoms that have increased lipid accumulation. This can be achieved by targeting genes that decrease lipid catabolization. Examples of genes include those involved in the activation of triacylglycerol and free fatty acids, β-oxidation of fatty acids, such as genes of acyl-CoA synthetase, 3-ketoacyl-CoA thiolase, acyl-CoA oxidase activity and phosphoglucomutase.

[0798] In some examples, algae may be modified for production of oil and biofuels, including fatty acids (e.g., fatty esters such as acid methyl esters (FAME) and fatty acid ethyl esters (FAEE)). Examples of methods of modifying microalgae include those described in Stovicek et al. Metab. Eng. Comm., 2015; 2:1; U.S. Pat. No. 8,945,839; and International Patent Publication No. WO 2015/086795.

[0799] In some examples, one or more genes may be introduced (e.g., overexpressed) to the plants (e.g., algae) to produce oils and biofuels (e.g., fatty acids) from a carbon source (e.g., alcohol). Examples of the genes include genes encoding acyl-CoA synthases, ester synthases, thioesterases (e.g., tesA, ‘tesA, tesB, fatB, fatB2, fatB3, fatA1, or fatA), acyl-CoA synthases (e.g., fadD, JadK, BH3103, pfl-4354, EAV15023, fadD1, fadD2, RPC_4074, fadDD35, fadDD22, faa39), ester synthases (e.g., synthase/acyl-CoA: diacylglycerl acyltransferase from Simmondsia chinensis, Acinetobacter sp. ADP, Alcanivorax borkumensis, Pseudomonas aeruginosa, Fundibacter jadensis, Arabidopsis thaliana, or Alkaligenes eutrophus, or variants thereof).

[0800] Additionally or alternatively, one or more genes in the plants (e.g., algae) may be inactivated (e.g., expression of the genes is decreased). For examples, one or more mutations may be introduced to the genes. Examples of such genes include genes encoding acyl-CoA dehydrogenases (e.g., fade), outer membrane protein receptors, and transcriptional regulator (e.g., repressor) of fatty acid biosynthesis (e.g., fabR), pyruvate formate lyases (e.g., pflB), lactate dehydrogenases (e.g., IdhA).

### Organic Acid Production

[0801] In one embodiment, plants may be modified to produce organic acids such as lactic acid. The plants may produce organic acids using sugars, pentose or hexose sugars. To this end, one or more genes may be introduced (e.g., and overexpressed) in the plants. An example of such genes include LDH gene.

[0802] In some examples, one or more genes may be inactivated (e.g., expression of the genes is decreased). For examples, one or more mutations may be introduced to the genes. The genes may include those encoding proteins involved an endogenous metabolic pathway which produces a metabolite other than the organic acid of interest and/or wherein the endogenous metabolic pathway consumes the organic acid.

[0803] Examples of genes that can be modified or introduced include those encoding pyruvate decarboxylases (pdc), fumarate reductases, alcohol dehydrogenases (adh), acetaldehyde dehydrogenases, phosphoenolpyruvate carboxylases (ppc), D-lactate dehydrogenases (d-ldh), L-lactate dehydrogenases (1-1dh), lactate 2-monooxygenases, lactate dehydrogenase, cytochrome-dependent lactate dehydrogenases (e.g., cytochrome B2-dependent L-lactate dehydrogenases).

### Enhancing Plant Properties for Biofuel Production

[0804] In one embodiment, the compositions, systems, and methods are used to alter the properties of the cell wall of plants to facilitate access by key hydrolyzing agents for a more efficient release of sugars for fermentation. By reducing the proportion of lignin in a plant the proportion of cellulose can be increased. In one embodiment, lignin biosynthesis may be downregulated in the plant so as to increase fermentable carbohydrates.

[0805] In some examples, one or more lignin biosynthesis genes may be down regulated. Examples of such genes include 4-coumarate 3-hydroxylases (C3H), phenylalanine ammonia-lyases (PAL), cinnamate 4-hydroxylases (C4H), hydroxycinnamoyl transferases (HCT), caffeic acid O-methyltransferases (COMT), caffeoyl CoA 3-O-methyltransferases (CCoAOMT), ferulate 5-hydroxylases (F5H), cinnamyl alcohol dehydrogenases (CAD), cinnamoyl CoA-reductases (CCR), 4-coumarate-CoA ligases (4CL), monolignol-lignin-specific glycosyltransferases, and aldehyde dehydrogenases (ALDH), and those described in WO 2008064289.

[0806] In some examples, plant mass that produces lower level of acetic acid during fermentation may be reduced. To this end, genes involved in polysaccharide acetylation (e.g., Cas1L and those described in WO 2010096488) may be inactivated.

### Other Microorganisms for Oils and Biofuel Production

[0807] In one embodiment, microorganisms other than plants may be used for production of oils and biofuels using the compositions, systems, and methods herein. Examples of the microorganisms include those of the genus of Escherichia, Bacillus, Lactobacillus, Rhodococcus, Synechococcus, Synechoystis, Pseudomonas, Aspergillus, Trichoderma, Neurospora, Fusarium, Humicola, Rhizomucor, Kluyveromyces, Pichia, Mucor, Myceliophtora, Penicillium, Phanerochaete, Pleurotus, Trametes, Chrysosporium, Saccharomyces, Stenotrophamonas, Schizosaccharomyces, Yarrowia, or Streptomyces.

### Plant Cultures and Regeneration

[0808] In one embodiment, the modified plants or plant cells may be cultured to regenerate a whole plant which possesses the transformed or modified genotype and thus the desired phenotype. Examples of regeneration techniques include those relying on manipulation of certain phytohormones in a tissue culture growth medium, relying on a biocide and/or herbicide marker which has been introduced together with the desired nucleotide sequences, obtaining from cultured protoplasts, plant callus, explants, organs, pollens, embryos or parts thereof.

### Detecting Modifications in the Plant Genome-Selectable Markers

[0809] When the compositions, systems, and methods are used to modify a plant, suitable methods may be used to confirm and detect the modification made in the plant. In some examples, when a variety of modifications are made, one or more desired modifications or traits resulting from the modifications may be selected and detected. The detection and confirmation may be performed by biochemical and molecular biology techniques such as Southern analysis, PCR, Northern blot, S1 RNase protection, primer-extension or reverse transcriptase-PCR, enzymatic assays, ribozyme activity, gel electrophoresis, Western blot, immunoprecipitation, enzyme-linked immunoassays, in situ hybridization, enzyme staining, and immunostaining.

[0810] In some cases, one or more markers, such as selectable and detectable markers, may be introduced to the plants. Such markers may be used for selecting, monitoring, isolating cells and plants with desired modifications and traits. A selectable marker can confer positive or negative selection and is conditional or non-conditional on the presence of external substrates. Examples of such markers include genes and proteins that confer resistance to antibiotics, such as hygromycin (hpt) and kanamycin (nptII), and genes that confer resistance to herbicides, such as phosphinothricin (bar) and chlorosulfuron (als), enzyme capable of producing or processing a colored substances (e.g., the β-glucuronidase, luciferase, B or C1 genes).

### Applications in Fungi

[0811] The compositions, systems, and methods described herein can be used to perform efficient and cost-effective gene or genome interrogation or editing or manipulation in fungi or fungal cells, such as yeast. The approaches and applications in plants may be applied to fungi as well.

[0812] A fungal cell may be any type of eukaryotic cell within the kingdom of fungi, such as phyla of Ascomycota, Basidiomycota, Blastocladiomycota, Chytridiomycota, Glomeromycota, Microsporidia, and Neocallimastigomycota. Examples of fungi or fungal cells in include yeasts, molds, and filamentous fungi.

[0813] In one embodiment, the fungal cell is a yeast cell. A yeast cell refers to any fungal cell within the phyla Ascomycota and Basidiomycota. Examples of yeasts include budding yeast, fission yeast, and mold, S. cerervisiae, Kluyveromyces marxianus, Issatchenkia orientalis, Candida spp. (e.g., Candida albicans), Yarrowia spp. (e.g., Yarrowia lipolytica), Pichia spp. (e.g., Pichia pastoris), Kluyveromyces spp. (e.g., Kluyveromyces lactis and Kluyveromyces marxianus), Neurospora spp. (e.g., Neurospora crassa), Fusarium spp. (e.g., Fusarium oxysporum), and Issatchenkia spp. (e.g., Issatchenkia orientalis, Pichia kudriavzevii and Candida acidothermophilum).

[0814] In one embodiment, the fungal cell is a filamentous fungal cell, which grow in filaments, e.g., hyphae or mycelia. Examples of filamentous fungal cells include Aspergillus spp. (e.g., Aspergillus niger), Trichoderma spp. (e.g., Trichoderma reesei), Rhizopus spp. (e.g., Rhizopus oryzae), and Mortierella spp. (e.g., Mortierella isabellina).

[0815] In one embodiment, the fungal cell is of an industrial strain. Industrial strains include any strain of fungal cell used in or isolated from an industrial process, e.g., production of a product on a commercial or industrial scale. Industrial strain may refer to a fungal species that is typically used in an industrial process, or it may refer to an isolate of a fungal species that may be also used for non-industrial purposes (e.g., laboratory research). Examples of industrial processes include fermentation (e.g., in production of food or beverage products), distillation, biofuel production, production of a compound, and production of a polypeptide. Examples of industrial strains include, without limitation, JAY270 and ATCC4124.

[0816] In one embodiment, the fungal cell is a polyploid cell whose genome is present in more than one copy. Polyploid cells include cells naturally found in a polyploid state, and cells that has been induced to exist in a polyploid state (e.g., through specific regulation, alteration, inactivation, activation, or modification of meiosis, cytokinesis, or DNA replication). A polyploid cell may be a cell whose entire genome is polyploid, or a cell that is polyploid in a particular genomic locus of interest. In some examples, the abundance of guide RNA may more often be a rate-limiting component in genome engineering of polyploid cells than in haploid cells, and thus the methods using the composition described herein may take advantage of using certain fungal cell types.

[0817] In one embodiment, the fungal cell is a diploid cell, whose genome is present in two copies. Diploid cells include cells naturally found in a diploid state, and cells that have been induced to exist in a diploid state (e.g., through specific regulation, alteration, inactivation, activation, or modification of meiosis, cytokinesis, or DNA replication). A diploid cell may refer to a cell whose entire genome is diploid, or it may refer to a cell that is diploid in a particular genomic locus of interest.

[0818] In one embodiment, the fungal cell is a haploid cell, whose genome is present in one copy. Haploid cells include cells naturally found in a haploid state, or cells that have been induced to exist in a haploid state (e.g., through specific regulation, alteration, inactivation, activation, or modification of meiosis, cytokinesis, or DNA replication). A haploid cell may refer to a cell whose entire genome is haploid, or it may refer to a cell that is haploid in a particular genomic locus of interest.

[0819] The compositions and systems, and nucleic acid encoding thereof may be introduced to fungi cells using the delivery systems and methods herein. Examples of delivery systems include lithium acetate treatment, bombardment, electroporation, and those described in Kawai et al., 2010, Bioeng Bugs. 2010 November-Dec; 1 (6): 395-403.

[0820] In some examples, a yeast expression vector (e.g., those with one or more regulatory elements) may be used. Examples of such vectors include a centromeric (CEN) sequence, an autonomous replication sequence (ARS), a promoter, such as an RNA Polymerase III promoter, operably linked to a sequence or gene of interest, a terminator such as an RNA polymerase III terminator, an origin of replication, and a marker gene (e.g., auxotrophic, antibiotic, or other selectable markers). Examples of expression vectors for use in yeast may include plasmids, yeast artificial chromosomes, 2μ plasmids, yeast integrative plasmids, yeast replicative plasmids, shuttle vectors, and episomal plasmids.

### Biofuel and Materials Production by Fungi

[0821] In one embodiment, the compositions, systems, and methods may be used for generating modified fungi for biofuel and material productions. For instance, the modified fungi for production of biofuel or biopolymers from fermentable sugars and optionally to be able to degrade plant-derived lignocellulose derived from agricultural waste as a source of fermentable sugars. Foreign genes required for biofuel production and synthesis may be introduced in to fungi In some examples, the genes may encode enzymes involved in the conversion of pyruvate to ethanol or another product of interest, degrade cellulose (e.g., cellulase), endogenous metabolic pathways which compete with the biofuel production pathway.

[0822] In some examples, the compositions, systems, and methods may be used for generating and/or selecting yeast strains with improved xylose or cellobiose utilization, isoprenoid biosynthesis, and/or lactic acid production. One or more genes involved in the metabolism and synthesis of these compounds may be modified and/or introduced to yeast cells. Examples of the methods and genes include lactate dehydrogenase, PDC1 and PDC5, and those described in Ha, S. J., et al. (2011) Proc. Natl. Acad. Sci. USA 108 (2): 504-9 and Galazka, J. M., et al. (2010) Science 330 (6000): 84-6; Jakočiūnas T et al., Metab Eng. 2015 March; 28:213-222; Stovicek V, et al., FEMS Yeast Res. 2017 Aug. 1; 17 (5).

### Improved Plants and Yeast Cells

[0823] The present disclosure further provides improved plants and fungi. The improved and fungi may comprise one or more genes introduced, and/or one or more genes modified by the compositions, systems, and methods herein. The improved plants and fungi may have increased food or feed production (e.g., higher protein, carbohydrate, nutrient or vitamin levels), oil and biofuel production (e.g., methanol, ethanol), tolerance to pests, herbicides, drought, low or high temperatures, excessive water, etc.

[0824] The plants or fungi may have one or more parts that are improved, e.g., leaves, stems, roots, tubers, seeds, endosperm, ovule, and pollen. The parts may be viable, nonviable, regeneratable, and/or non-regeneratable.

[0825] The improved plants and fungi may include gametes, seeds, embryos, either zygotic or somatic, progeny and/or hybrids of improved plants and fungi. The progeny may be a clone of the produced plant or fungi, or may result from sexual reproduction by crossing with other individuals of the same species to introgress further desirable traits into their offspring. The cell may be in vivo or ex vivo in the cases of multicellular organisms, particularly plants.

### Further Applications in Plants

[0826] Further applications of the compositions, systems, and methods on plants and fungi include visualization of genetic element dynamics (e.g., as described in Chen B, et al., Cell. 2013 Dec. 19; 155 (7): 1479-91), targeted gene disruption positive-selection in vitro and in vivo (as described in Malina A et al., Genes Dev. 2013 Dec. 1; 27 (23): 2602-14), epigenetic modification such as using fusion of IscB polypeptide nuclease and histone-modifying enzymes (e.g., as described in Rusk N, Nat Methods. 2014 January; 11 (1): 28), identifying transcription regulators (e.g., as described in Waldrip Z J, Epigenetics. 2014 September; 9 (9): 1207-11), anti-virus treatment for both RNA and DNA viruses (e.g., as described in Price A A, et al., Proc Natl Acad Sci USA. 2015 May 12; 112 (19): 6164-9; Ramanan V et al., Sci Rep. 2015 Jun. 2; 5:10833), alteration of genome complexity such as chromosome numbers (e.g., as described in Karimi-Ashtiyani R et al., Proc Natl Acad Sci USA. 2015 Sep. 8; 112 (36): 11211-6; Anton T, et al., Nucleus. 2014 March-Apr; 5 (2): 163-72), self-cleavage of the composition for controlled inactivation/activation (e.g., as described Sugano S S et al., Plant Cell Physiol. 2014 March; 55 (3): 475-81), multiplexed gene editing (as described in Kabadi A M et al., Nucleic Acids Res. 2014 Oct. 29; 42 (19): e147), development of kits for multiplex genome editing (as described in Xing H L et al., BMC Plant Biol. 2014 Nov. 29; 14:327), starch production (as described in Hebelstrup K H et al., Front Plant Sci. 2015 Apr. 23; 6:247), targeting multiple genes in a family or pathway (e.g., as described in Ma X et al., Mol Plant. 2015 August; 8 (8): 1274-84), regulation of non-coding genes and sequences (e.g., as described in Lowder L G, et al., Plant Physiol. 2015 October; 169 (2): 971-85), editing genes in trees (e.g., as described in Belhaj K et al., Plant Methods. 2013 Oct. 11; 9 (1): 39; Harrison M M, et al., Genes Dev. 2014 Sep. 1; 28 (17): 1859-72; Zhou X et al., New Phytol. 2015 October; 208 (2): 298-301), introduction of mutations for resistance to host-specific pathogens and pests.

[0827] Additional examples of modifications of plants and fungi that may be performed using the compositions, systems, and methods include analogous modifications described in International Patent Publication Nos. WO2016/099887, WO2016/025131, WO2016/073433, WO2017/066175, WO2017/100158, WO 2017/105991, WO2017/106414, WO2016/100272, WO2016/100571, WO 2016/100568, WO 2016/100562, and WO 2017/019867.

### Applications in Non-Human Animals

[0828] The compositions, systems, and methods may be used to study and modify non-human animals, e.g., introducing desirable traits and disease resilience, treating diseases, facilitating breeding, etc. In one embodiment, the compositions, systems, and methods may be used to improve breeding and introducing desired traits, e.g., increasing the frequency of trait-associated alleles, introgression of alleles from other breeds/species without linkage drag, and creation of de novo favorable alleles. Genes and other genetic elements that can be targeted may be screened and identified. Examples of application and approaches include those described in Tait-Burkard C, et al., Livestock 2.0-genome editing for fitter, healthier, and more productive farmed animals. Genome Biol. 2018 Nov. 26; 19 (1): 204; Lillico S, Agricultural applications of genome editing in farmed animals. Transgenic Res. 2019 August; 28 (Suppl 2): 57-60; Houston R D, et al., Harnessing genomics to fast-track genetic improvement in aquaculture. Nat Rev Genet. 2020 Apr. 16. doi: 10.1038/s41576-020-0227-y, which are incorporated herein by reference in their entireties. Applications described in other sections such as therapeutic, diagnostic, etc. can also be used on the animals herein.

[0829] The compositions, systems, and methods may be used on animals such as fish, amphibians, reptiles, mammals, and birds. The animals may be farm and agriculture animals, or pets. Examples of farm and agriculture animals include horses, goats, sheep, swine, cattle, llamas, alpacas, and birds, e.g., chickens, turkeys, ducks, and geese. The animals may be a non-human primate, e.g., baboons, capuchin monkeys, chimpanzees, lemurs, macaques, marmosets, tamarins, spider monkeys, squirrel monkeys, and vervet monkeys. Examples of pets include dogs, cats horses, wolfs, rabbits, ferrets, gerbils, hamsters, chinchillas, fancy rats, guinea pigs, canaries, parakeets, and parrots.

[0830] In one embodiment, one or more genes may be introduced (e.g., overexpressed) in the animals to obtain or enhance one or more desired traits. Growth hormones, insulin-like growth factors (IGF-1) may be introduced to increase the growth of the animals, e.g., pigs or salmon (such as described in Pursel V G et al., J Reprod Fertil Suppl. 1990; 40:235-45; Waltz E, Nature. 2017; 548:148). Fat-1 gene (e.g., from C elegans) may be introduced for production of larger ratio of n-3 to n-6 fatty acids may be induced, e.g. in pigs (such as described in Li M, et al., Genetics. 2018; 8:1747-54). Phytase (e.g., from E. coli) xylanase (e.g., from Aspergillus niger), beta-glucanase (e.g., from bacillus lichenformis) may be introduced to reduce the environmental impact through phosphorous and nitrogen release reduction, e.g. in pigs (such as described in Golovan S P, et al., Nat Biotechnol. 2001; 19:741-5; Zhang X et al., elife. 2018). shRNA decoy may be introduced to induce avian influenza resilience e.g. in chicken (such as described in Lyall et al., Science. 2011; 331:223-6). Lysozyme or lysostaphin may be introduced to induce mastitis resilience e.g., in goat and cow (such as described in Maga E A et al., Foodborne Pathog Dis. 2006; 3:384-92; Wall R J, et al., Nat Biotechnol. 2005; 23:445-51). Histone deacetylase such as HDAC6 may be introduced to induce PRRSV resilience, e.g., in pig (such as described in Lu T., et al., PLOS One. 2017; 12: e0169317). CD163 may be modified (e.g., inactivated or removed) to introduce PRRSV resilience in pigs (such as described in Prather R S et al., Sci Rep. 2017 Oct. 17; 7 (1): 13371). Similar approaches may be used to inhibit or remove viruses and bacteria (e.g., Swine Influenza Virus (SIV) strains which include influenza C and the subtypes of influenza A known as H1N1, H1N2, H2N1, H3N1, H3N2, and H2N3, as well as pneumonia, meningitis and oedema) that may be transmitted from animals to humans.

[0831] In one embodiment, one or more genes may be modified or edited for disease resistance and production traits. Myostatin (e.g., GDF8) may be modified to increase muscle growth, e.g., in cow, sheep, goat, catfish, and pig (such as described in Crispo M et al., PLOS One. 2015; 10: e0136690; Wang X, et al., Anim Genet. 2018; 49:43-51; Khalil K, et al., Sci Rep. 2017; 7:7301; Kang J-D, et al., RSC Adv. 2017; 7:12541-9). Pc POLLED may be modified to induce horlessness, e.g., in cow (such as described in Carlson D F et al., Nat Biotechnol. 2016; 34:479-81). KISSIR may be modified to induce boretaint (hormone release during sexual maturity leading to undesired meat taste), e.g., in pigs. Dead end protein (dnd) may be modified to induce sterility, e.g., in salmon (such as described in Wargelius A, et al., Sci Rep. 2016; 6:21284). Nano2 and DDX may be modified to induce sterility (e.g., in surrogate hosts), e.g., in pigs and chicken (such as described Park K-E, et al., Sci Rep. 2017; 7:40176; Taylor L et al., Development. 2017; 144:928-34). CD163 may be modified to induce PRRSV resistance, e.g., in pigs (such as described in Whitworth K M, et al., Nat Biotechnol. 2015; 34:20-2). RELA may be modified to induce ASFV resilience, e.g., in pigs (such as described in Lillico S G, et al., Sci Rep. 2016; 6:21645). CD18 may be modified to induce Mannheimia (Pasteurella) haemolytica resilience, e.g., in cows (such as described in Shanthalingam S, et al., roc Natl Acad Sci USA. 2016; 113:13186-90). NRAMPI may be modified to induce tuberculosis resilience, e.g., in cows (such as described in Gao Y et al., Genome Biol. 2017; 18:13). Endogenous retrovirus genes may be modified or removed for xenotransplantation such as described in Yang L, et al. Science. 2015; 350:1101-4; Niu D et al., Science. 2017; 357:1303-7). Negative regulators of muscle mass (e.g., Myostatin) may be modified (e.g., inactivated) to increase muscle mass, e.g., in dogs (as described in Zou Q et al., J Mol Cell Biol. 2015 December; 7 (6): 580-3).

[0832] Animals such as pigs with severe combined immunodeficiency (SCID) may generated (e.g., by modifying RAG2) to provide useful models for regenerative medicine, xenotransplantation (discussed also elsewhere herein), and tumor development. Examples of methods and approaches include those described Lee K, et al., Proc Natl Acad Sci USA. 2014 May 20; 111 (20): 7260-5; and Schomberg et al. FASEB Journal, April 2016; 30 (1): Suppl 571.1.

[0833] SNPs in the animals may be modified. Examples of methods and approaches include those described Tan W. et al., Proc Natl Acad Sci USA. 2013 Oct. 8; 110 (41): 16526-31; Mali P, et al., Science. 2013 Feb. 15; 339 (6121): 823-6.

[0834] Stem cells (e.g., induced pluripotent stem cells) may be modified and differentiated into desired progeny cells, e.g., as described in Heo Y T et al., Stem Cells Dev. 2015 Feb. 1; 24 (3): 393-402.

[0835] Profile analysis (such as Igenity) may be performed on animals to screen and identify genetic variations related to economic traits. The genetic variations may be modified to introduce or improve the traits, such as carcass composition, carcass quality, maternal and reproductive traits and average daily gain.

### Kits

[0836] In one aspect, the invention provides kits containing any one or more of the elements disclosed in the above methods and compositions. In one aspect, the invention provides a kit comprising one or more of the components described herein. In one embodiment, the kit comprises the compositions herein and instructions for using the kit. In one embodiment, the kit comprises a vector system and instructions for using the kit. In one embodiment, the kit comprises a delivery system and instructions for using the kit. In one embodiment, the kit comprises a vector system and instructions for using the kit. Elements may be provided individually or in combinations, and may be provided in any suitable container, such as a vial, a bottle, or a tube. The kits may include the ωRNA and optionally an unbound protector strand as described herein. The kits may include the ωRNA with a protector strand bound to at least partially to a reprogrammable spacer portion of the ωRNA sequence (i.e., phRNA). Thus the kits may include the phRNA in the form of a partially double stranded nucleotide sequence as described here. In one embodiment, the kit includes instructions in one or more languages, for example in more than one language. The instructions may be specific to the applications and methods described herein.

[0837] In one embodiment, a kit comprises one or more reagents for use in a process utilizing one or more of the elements described herein. Reagents may be provided in any suitable container. For example, a kit may provide one or more reaction or storage buffers. Reagents may be provided in a form that is usable in a particular assay, or in a form that requires addition of one or more other components before use (e.g., in concentrate or lyophilized form). A buffer can be any buffer, including but not limited to a sodium carbonate buffer, a sodium bicarbonate buffer, a borate buffer, a Tris buffer, a MOPS buffer, a HEPES buffer, and combinations thereof. In one embodiment, the buffer is alkaline. In one embodiment, the buffer has a pH from about 7 to about 10. In one embodiment, the kit comprises one or more oligonucleotides corresponding to a ωRNA scaffold, reprogrammable sequence for insertion into a vector so as to operably link the ωRNA sequence and a regulatory element. In one embodiment, the kit comprises a homologous recombination template polynucleotide. In one embodiment, the kit comprises one or more of the vectors and/or one or more of the polynucleotides described herein. The kit may advantageously allow to provide all elements of the systems of the invention.

[0838] The invention is further described in the following examples, which do not limit the scope of the invention described in the claims.

[0839] Further embodiments are illustrated in the following Examples which are given for illustrative purposes only and are not intended to limit the scope of the invention.

### EXAMPLES

### Example 1

[0840] The widespread IS200/605 transposon family encodes diverse re-targetable RNA-guided endonucleasesThe prokaryotic RNA-guided defense system CRISPR-Cas9 (type II CRISPR-Cas), which has been adopted for genome editing in eukaryotic cells (Zhang, F. (2019), Quarterly Reviews of Biophysics 52; Hille, F, et al. (2018), Cell 172:1239-1259), is thought to have evolved from IscB proteins. Despite its wide distribution across prokaryotes and shared domain composition and architecture with Cas9, the function of IscB remains unknown (FIG. 43). Moreover, given that IscB has not been reported to be associated with non-coding RNA (ncRNA) or CRISPR arrays, the evolutionary origins of the RNA-guided activity in Cas9 systems are unclear. IscB is encoded by a distinct subset of IS200/605 superfamily transposons that also include transposons encoding tnpB, a putative endonuclease distantly related to iscB and thought to be the ancestor of Cas12, the type V CRISPR effector (Kapitonav, V. et al. (2015), J. Bacteriol. 198, 797-807; Siguir, P. et al. (2014), FEMS Microbiol. Rev. 38, 865-891; S. Shmakov, S. et al. (2017), Nat. Rev. Microbiol. 15, 169-182). Using phylogenetic analysis, RNA-seq, and biochemical experiments, Applicants sought to elucidate the functions of these proteins and the origin of RNA-guided activity in class 2 CRISPR systems.

### Evolution and Diversity of IscB Systems

[0841] Applicants next investigated the evolutionary relationships between IscB, Cas9, and other homologous proteins to gain a broader insight into the evolution of RNA-guided mechanisms. In our search for proteins containing split RuvC domains, Applicants detected another group of shorter, ˜350 aa IscB homologs that are also encoded in IS200/605 superfamily transposons. These proteins contain a PLMP domain and split RuvC but lack the HNH domain. Applicants renamed these proteins IsrB (Insertion sequence RuvC-like OrfB) to emphasize their distinct domain architecture, replacing the previous designation, IscB1 (Kapitonov, V. et al. (2015), J. Bacteriol. 198, 797-807). In addition to IscB and IsrB, Applicants identified a family of even smaller (˜180 aa) proteins that only contained the PLMP domain and HNH domain but no RuvC domain, which Applicants named IshB (Insertion sequence HNH-like OrfB).

[0842] To investigate the relationships between these proteins, Applicants built a maximum likelihood (ML) tree from a multiple alignment of the split RuvC nuclease and BH domains using IQ-TREE 2 (FIGS. 9A, 20) (Mihn, B. et al (2020), Mol. Biol. Evol. 37, 1530-1534). The topology of the resulting tree was supported by several additional ML and Bayesian phylogenetic and robustness analyses (FIGS. 10, 20, 21, 22), see Supplementary Text for details). In the resulting tree, IsrB, IscB, and Cas9 formed distinct, strongly supported clades, suggesting that each of these nucleases originated from a unique evolutionary event (FIGS. 9A, 10, 21C-21D, and Supplementary Text). Applicants then analyzed the associations between each protein cluster and IS200/605 tnpA genes (Kapitonov, V. et al. (2015), J. Bacteriol. 198, 797-807), ωRNAs, CRISPR-Cas adaptation genes (cas1, cas2, cas4, and csn2), CRISPR arrays upstream and downstream of the respective ORF, and CRISPR anti-repeats (FIG. 9A). As discussed above, IscB and isrB were rarely associated with CRISPR arrays and were not found to be associated with CRISPR-Cas adaptation genes. The isrBs are associated with structurally distinct ωRNAs. The iscBs are flanked by transposon ends similar to those mobilized by TnpA (Kapitonov, V. et al. (2015), J. Bacteriol. 198, 797-807), but are only found near tnpA in 56/2811 of unique IscB loci (2.0%) (FIGS. 9A, 23D).

[0843] Additionally, Applicants identified two distinct groups of Cas9s. The first is a new subtype, II-D, a group of relatively small cas9s (˜700aa) that are not associated with any other known cas genes (Makarova, K., et al. (2020), Nat. Rev. Microbiol. 18, 67-83). The second is a distinct clade branching from within the II-C subtype, which includes exceptionally large cas9s (>1700aa) that are associated with tnpA (FIG. 9A, FIG. 23). The tnpA-associated II-C loci often encompass unusually long DRs (more than 42 bp in length) and in some cases encode HIRAN domain proteins between the cas9 and other cas genes (FIG. 9A). Predicted transposon ends surround various combinations of the tnpA, cas acquisition genes, and CRISPR arrays in these loci.

[0844] These phylogenetic and association analyses confirm that IS200/605 transposon-encoded IscBs and IsrBs share a common evolutionary history with Cas9 (Supplementary Text). Given the deep position of the IsrB clade in the tree (FIG. 9A) and the lack of the HNH domain, IsrBs likely represent the ancestral state, probably having evolved from the compact RuvC endonuclease (Majorek, K. et al. (2014), Nucleic Acids Res. 42, 4160-4179). Almost all isrBs are associated with an ωRNA, suggesting that these systems became RNA-guided at an early stage of evolution, concomitantly with the insertions in the RuvC-like domain that are likely to be involved in complex formation with ωRNA. IsrB subsequently gained the HNH domain, possibly through insertion of another mobile element or recombination with a gene encoding an IshB-like protein, founding the IscB family (gray squares, FIG. 9A-9B, Supplementary Text).

[0845] CRISPR arrays emerged within IscB systems on multiple, independent occasions (black circles, FIG. 9A-9B). These short arrays consist of repeats that could have evolved by duplication of segments of the ancestral ωRNA. The resulting systems encompass a hybrid CRISPR-ωRNA that consists of a CRISPR array preceding a partial ωRNA. These CRISPR-associated IscB proteins likely also gained REC-like insertions between the RuvC-I and RuvC-II subdomains on a number of occasions, often contemporaneously with or shortly after the CRISPR association (white squares, FIG. 9A-9B). In particular, one CRISPR-associated IscB cluster (cluster 2089) apparently founded the Cas9 family (FIG. 10) upon the loss of the hallmark PLMP domain (gray square, FIG. 9A-9B). Moreover, the tracrRNAs of Subtype II-D, a deep branch in the Cas9 subtree (ML branch support: ≥97/100, Bayesian posterior probability: 100%, FIG. 21B-D, FIG. 10), shows significant similarity to IscB ωRNAs (E-value 4.1e-8), suggesting that the Cas9 tracrRNA originally evolved from ωRNA (FIG. 11). The continued evolution of Cas9 apparently involved the gain of additional REC-like insertions between the bridge helix and the RuvC-II domains resulting in increased protein size. Finally, upon the association with the CRISPR adaptation machinery (cas1, cas2, and possibly cas4) (light gray circles, FIG. 9A-B), a burst of Cas9 diversification and widespread dispersion among bacteria via horizontal gene transfer followed, resulting in the evolution of multiple type II CRISPR subtypes.

[0846] Applicants also explored the evolutionary history of ωRNAs. By iteratively building a set of ωRNA profiles that spanned all major groups of ωRNAs associated with iscBs and isrBs, Applicants found that diverse ωRNAs are associated with almost all iscBs and isrBs. Moreover, different IsrB and IscB clades are associated with distinct ωRNA structures (FIG. 12, FIG. 13A, FIG. 20A). The transition from isrB to iscB was likely accompanied by loss of a second pseudoknot, the adaptor pseudoknot, between the transposon end region and the multi-stem loop in isrB-associated ωRNAs (light gray square, FIG. 9A-9C). The inverse relationship between the complexity of the ωRNA structure and the associated protein size is also reflected by the simplified ωRNA structures associated with clades of large IscBs and the even smaller tracrRNAs associated with large Cas9s (FIG. 9C, FIG. 13). Accession numbers and natural targets search data are shown in Table 6A-6H.

TABLE 6
Table 6A-6H. Accession numbers and natural target search data.
A. Early Cas9 Amino Acid
N sites 1048
N proteins 128

| Model | −LnL | df | AIC | AICc | BIC |
|---|---|---|---|---|---|
| LG | 158546.793 | 253 | 317599.586 | 317761.456 | 318853.11 |
| LG + I | 158165.737 | 254 | 316839.474 | 317002.828 | 318097.952 |
| LG + G4 | 153534.28 | 254 | 307576.559 | 307739.914 | 308835.037 |
| LG + I + G4 | 153450.975 | 255 | 307411.95 | 307576.798 | 308675.383 |
| LG + F + I + G4 | 153344.18 | 274 | 307236.361 | 307431.316 | 308593.932 |
| WAG + I + G4 | 153438.079 | 255 | 307386.158 | 307551.006 | 308649.59 |
| WAG + F + I + G4 | 153281.497 | 274 | 307110.994 | 307305.949 | 308468.565 |
| JTT + I + G4 | 154955.321 | 255 | 310420.642 | 310585.491 | 311684.075 |
| JTT + F + I + G4 | 154753.553 | 274 | 310055.105 | 310250.06 | 311412.676 |
| JTTDCMut + I + G4 | 154922.992 | 255 | 310355.983 | 310520.832 | 311619.416 |
| JTTDCMut + F + I + G4 | 154725.109 | 274 | 309998.219 | 310193.173 | 311355.79 |
| DCMut + I + G4 | 155870.3 | 255 | 312250.6 | 312415.448 | 313514.032 |
| DCMut + F + I + G4 | 155113.884 | 274 | 310775.767 | 310970.722 | 312133.338 |
| VT + I + G4 | 153592.848 | 255 | 307695.696 | 307860.544 | 308959.128 |
| VT + F + I + G4 | 153448.997 | 274 | 307445.995 | 307640.95 | 308803.566 |
| PMB + I + G4 | 154434.683 | 255 | 309379.365 | 309544.214 | 310642.798 |
| PMB + F + I + G4 | 154055.781 | 274 | 308659.563 | 308854.517 | 310017.134 |
| Blosum62 + I + G4 | 154250.423 | 255 | 309010.846 | 309175.695 | 310274.279 |
| Blosum62 + F + I + G4 | 153937.508 | 274 | 308423.015 | 308617.97 | 309780.586 |
| Dayhoff + I + G4 | 155873.824 | 255 | 312257.649 | 312422.497 | 313521.082 |
| Dayhoff + F + I + G4 | 155119.656 | 274 | 310787.312 | 310982.267 | 312144.883 |
| mtREV + I + G4 | 165269.973 | 255 | 331049.945 | 331214.794 | 332313.378 |
| mtREV + F + I + G4 | 157064.584 | 274 | 314677.168 | 314872.123 | 316034.739 |
| mtART + I + G4 | 169405.3 | 255 | 339320.601 | 339485.449 | 340584.034 |
| mtART + F + I + G4 | 159787.176 | 274 | 320122.351 | 320317.306 | 321479.923 |
| mtZOA + I + G4 | 163921.253 | 255 | 328352.507 | 328517.355 | 329615.94 |
| mtZOA + F + I + G4 | 157454.96 | 274 | 315457.92 | 315652.874 | 316815.491 |
| mtMet + I + G4 | 166109.582 | 255 | 332729.164 | 332894.013 | 333992.597 |
| mtMet + F + I + G4 | 157397.596 | 274 | 315343.191 | 315538.146 | 316700.762 |
| mtVer + I + G4 | 167284.318 | 255 | 335078.637 | 335243.485 | 336342.07 |
| mtVer + F + I + G4 | 159774.207 | 274 | 320096.413 | 320291.368 | 321453.984 |
| mtInv + I + G4 | 166773.594 | 255 | 334057.187 | 334222.036 | 335320.62 |
| mtInv + F + I + G4 | 156166.225 | 274 | 312880.451 | 313075.405 | 314238.022 |
| mtMAM + I + G4 | 170224.016 | 255 | 340958.033 | 341122.881 | 342221.466 |
| mtMAM + F + I + G4 | 161394.78 | 274 | 323337.56 | 323532.515 | 324695.131 |
| HIVb + I + G4 | 158770.796 | 255 | 318051.592 | 318216.441 | 319315.025 |
| HIVb + F + I + G4 | 158521.047 | 274 | 317590.094 | 317785.049 | 318947.665 |
| HIVw + I + G4 | 165646.002 | 255 | 331802.005 | 331966.853 | 333065.438 |
| HIVw + F + I + G4 | 162883.131 | 274 | 326314.262 | 326509.217 | 327671.833 |
| FLU + I + G4 | 158550.963 | 255 | 317611.926 | 317776.774 | 318875.359 |
| FLU + F + I + G4 | 157457.023 | 274 | 315462.047 | 315657.001 | 316819.618 |
| rtREV + I + G4 | 154713.716 | 255 | 309937.431 | 310102.28 | 311200.864 |
| rtREV + F + I + G4 | 153762.52 | 274 | 308073.04 | 308267.995 | 309430.611 |
| cpREV + I + G4 | 154803.199 | 255 | 310116.399 | 310281.247 | 311379.832 |
| cpREV + F + I + G4 | 154747.45 | 274 | 310042.901 | 310237.855 | 311400.472 |

B. Early Cas9 DNA
N sites 3039
N proteins 128

| | | | | | |
|---|---|---|---|---|---|
| GTR + F | 292394.76 | 261 | 585311.52 | 585360.769 | 586882.553 |
| GTR + F + I | 291454.796 | 262 | 583433.591 | 583483.235 | 585010.644 |
| GTR + F + G4 | 279093.787 | 262 | 558711.574 | 558761.218 | 560288.626 |
| GTR + F + I + G4 | 278956.868 | 263 | 558439.736 | 558489.777 | 560022.808 |
| SYM + I + G4 | 279352.506 | 260 | 559225.011 | 559273.867 | 560790.025 |
| TVM + F + I + G4 | 278968.492 | 262 | 558460.983 | 558510.627 | 560038.036 |
| TVMe + I + G4 | 279407.399 | 259 | 559332.797 | 559381.261 | 560891.792 |
| TIM3 + F + I + G4 | 279049.294 | 261 | 558620.588 | 558669.837 | 560191.621 |
| TIM3e + I + G4 | 279401.196 | 258 | 559318.391 | 559366.465 | 560871.367 |
| TIM2 + F + I + G4 | 279352.841 | 261 | 559227.682 | 559276.931 | 560798.715 |
| TIM2e + I + G4 | 280434.163 | 258 | 561384.325 | 561432.399 | 562937.3 |
| TIM + F + I + G4 | 279440.534 | 261 | 559403.068 | 559452.317 | 560974.101 |
| TIMe + I + G4 | 280499.184 | 258 | 561514.369 | 561562.442 | 563067.344 |
| TPM3u + F + I + G4 | 279064.274 | 260 | 558648.548 | 558697.403 | 560213.562 |
| TPM3 + F + I + G4 | 279064.274 | 260 | 558648.548 | 558697.403 | 560213.562 |
| TPM2u + F + I + G4 | 279363.223 | 260 | 559246.446 | 559295.301 | 560811.459 |
| TPM2 + F + I + G4 | 279362.542 | 260 | 559245.084 | 559293.939 | 560810.097 |
| K3Pu + F + I + G4 | 279454.965 | 260 | 559429.93 | 559478.785 | 560994.943 |
| K3P + I + G4 | 280559.351 | 257 | 561632.702 | 561680.387 | 563179.657 |
| TN + F + I + G4 | 279455.636 | 260 | 559431.272 | 559480.128 | 560996.286 |
| TNe + I + G4 | 280496.481 | 257 | 561506.961 | 561554.646 | 563053.917 |
| HKY + F + I + G4 | 279465.418 | 259 | 559448.837 | 559497.3 | 561007.831 |
| K2P + I + G4 | 280565.775 | 256 | 561643.549 | 561690.848 | 563184.486 |
| F81 + F + I + G4 | 281411.443 | 258 | 563338.885 | 563386.958 | 564891.86 |
| JC + I + G4 | 282299.492 | 255 | 565108.984 | 565155.897 | 566643.901 |

C. Omega RNA.
N site 522
N RNAs 711

| Model | −LnL | df | AIC | AICc | BIC |
|---|---|---|---|---|---|
| GTR + F | 137969.864 | 1427 | 278793.729 | 4354305.73 | 284869.42 |
| GTR + F + ASC | 137969.861 | 1427 | 278793.721 | 4354305.72 | 284869.413 |
| GTR + F + G4 | 132814.717 | 1428 | 268485.434 | 4349709.43 | 274565.383 |
| GTR + F + ASC + G4 | 132814.709 | 1428 | 268485.418 | 4349709.42 | 274565.367 |
| SYM + G4 | 132847.753 | 1425 | 268545.507 | 4332645.51 | 274612.683 |
| SYM + ASC + G4 | 132847.753 | 1425 | 268545.507 | 4332645.51 | 274612.683 |
| TVM + F + G4 | 132918.625 | 1427 | 268691.251 | 4344203.25 | 274766.942 |
| TVM + F + ASC + G4 | 132918.625 | 1427 | 268691.251 | 4344203.25 | 274766.942 |
| TVMe + G4 | 132862.651 | 1424 | 268573.302 | 4326973.3 | 274636.22 |
| TVMe + ASC + G4 | 132862.651 | 1424 | 268573.302 | 4326973.3 | 274636.22 |
| TIM3 + F + G4 | 132865.718 | 1426 | 268583.436 | 4338387.44 | 274654.87 |
| TIM3 + F + ASC + G4 | 132865.718 | 1426 | 268583.436 | 4338387.44 | 274654.87 |
| TIM3e + G4 | 132931.537 | 1423 | 268709.074 | 4321413.07 | 274767.735 |
| TIM3e + ASC + G4 | 132931.537 | 1423 | 268709.074 | 4321413.07 | 274767.735 |
| TIM2 + F + G4 | 132882.127 | 1426 | 268616.255 | 4338420.26 | 274687.689 |
| TIM2 + F + ASC + G4 | 132882.127 | 1426 | 268616.255 | 4338420.26 | 274687.689 |
| TIM2e + G4 | 132910.507 | 1423 | 268667.013 | 4321371.01 | 274725.674 |
| TIM2e + ASC + G4 | 132910.507 | 1423 | 268667.013 | 4321371.01 | 274725.674 |
| TIM + F + G4 | 132882.794 | 1426 | 268617.588 | 4338421.59 | 274689.022 |
| TIM + F + ASC + G4 | 132882.794 | 1426 | 268617.588 | 4338421.59 | 274689.022 |
| TIMe + G4 | 132943.006 | 1423 | 268732.012 | 4321436.01 | 274790.673 |
| TIMe + ASC + G4 | 132943.006 | 1423 | 268732.012 | 4321436.01 | 274790.673 |
| TPM3u + F + G4 | 132975.699 | 1425 | 268801.399 | 4332901.4 | 274868.575 |
| TPM3u + F + ASC + G4 | 132975.699 | 1425 | 268801.399 | 4332901.4 | 274868.575 |
| TPM3 + F + G4 | 132975.699 | 1425 | 268801.399 | 4332901.4 | 274868.575 |
| TPM3 + F + ASC + G4 | 132975.699 | 1425 | 268801.399 | 4332901.4 | 274868.575 |
| TPM2u + F + G4 | 132989.627 | 1425 | 268829.254 | 4332929.25 | 274896.43 |
| TPM2u + F + ASC + G4 | 132989.627 | 1425 | 268829.254 | 4332929.25 | 274896.43 |
| TPM2 + F + G4 | 132989.627 | 1425 | 268829.254 | 4332929.25 | 274896.43 |
| TPM2 + F + ASC + G4 | 132989.627 | 1425 | 268829.254 | 4332929.25 | 274896.43 |
| K3Pu + F + G4 | 132994.102 | 1425 | 268838.203 | 4332938.2 | 274905.379 |
| K3Pu + F + ASC + G4 | 132994.102 | 1425 | 268838.203 | 4332938.2 | 274905.379 |
| K3P + G4 | 132958.903 | 1422 | 268761.806 | 4315773.81 | 274816.21 |
| K3P + ASC + G4 | 132958.903 | 1422 | 268761.806 | 4315773.81 | 274816.21 |
| TN + F + G4 | 132909.484 | 1425 | 268668.968 | 4332768.97 | 274736.145 |
| TN + F + ASC + G4 | 132909.484 | 1425 | 268668.968 | 4332768.97 | 274736.145 |
| TNe + G4 | 132969.855 | 1422 | 268783.709 | 4315795.71 | 274838.113 |
| TNe + ASC + G4 | 132969.857 | 1422 | 268783.714 | 4315795.71 | 274838.117 |
| HKY + F + G4 | 133021.421 | 1424 | 268890.843 | 4327290.84 | 274953.761 |
| HKY + F + ASC + G4 | 133021.421 | 1424 | 268890.843 | 4327290.84 | 274953.761 |
| K2P + G4 | 132985.807 | 1421 | 268813.613 | 4310137.61 | 274863.759 |
| K2P + ASC + G4 | 132985.807 | 1421 | 268813.613 | 4310137.61 | 274863.759 |
| F81 + F + G4 | 135134.431 | 1423 | 273114.861 | 4325818.86 | 279173.522 |
| F81 + F + ASC + G4 | 135134.431 | 1423 | 273114.861 | 4325818.86 | 279173.522 |
| JC + G4 | 135161.994 | 1420 | 273163.988 | 4308803.99 | 279209.876 |
| JC + ASC + G4 | 135161.994 | 1420 | 273163.988 | 4308803.99 | 279209.876 |

D. PLMP Domain
N sites 49
N proteins 2050

| Model | −LnL | df | AIC | AICc | BIC |
|---|---|---|---|---|---|
| LG | 122204.458 | 4071 | 252550.916 | 33406774.9 | 260252.517 |
| LG + G4 | 118284.816 | 4072 | 244713.633 | 33415225.6 | 252417.125 |
| LG + F + G4 | 118726.584 | 4091 | 245635.168 | 33726379.2 | 253374.605 |
| WAG + G4 | 118217.215 | 4072 | 244578.43 | 33415090.4 | 252281.922 |
| WAG + F + G4 | 118513.55 | 4091 | 245209.1 | 33725953.1 | 252948.536 |
| JTT + G4 | 119140.743 | 4072 | 246425.487 | 33416937.5 | 254128.979 |
| JTT + F + G4 | 119731.465 | 4091 | 247644.929 | 33728388.9 | 255384.366 |
| JTTDCMut + G4 | 119116.725 | 4072 | 246377.451 | 33416889.5 | 254080.943 |
| JTTDCMut + F + G4 | 119688.426 | 4091 | 247558.851 | 33728302.9 | 255298.288 |
| DCMut + G4 | 120403.011 | 4072 | 248950.023 | 33419462 | 256653.515 |
| DCMut + F + G4 | 120243.902 | 4091 | 248669.803 | 33729413.8 | 256409.24 |
| VT + G4 | 117974.209 | 4072 | 244092.419 | 33414604.4 | 251795.911 |
| VT + F + G4 | 118386.151 | 4091 | 244954.302 | 33725698.3 | 252693.739 |
| PMB + G4 | 118297.184 | 4072 | 244738.368 | 33415250.4 | 252441.86 |
| PMB + F + G4 | 118922.423 | 4091 | 246026.846 | 33726770.8 | 253766.283 |
| Blosum62 + G4 | 118283.672 | 4072 | 244711.344 | 33415223.3 | 252414.836 |
| Blosum62 + F + G4 | 118856.612 | 4091 | 245895.224 | 33726639.2 | 253634.661 |
| Dayhoff + G4 | 120429.145 | 4072 | 249002.29 | 33419514.3 | 256705.782 |
| Dayhoff + F + G4 | 120262.14 | 4091 | 248706.279 | 33729450.3 | 256445.716 |
| mtREV + G4 | 127008.803 | 4072 | 262161.606 | 33432673.6 | 269865.098 |
| mtREV + F + G4 | 121622.94 | 4091 | 251427.88 | 33732171.9 | 259167.317 |
| mtART + G4 | 130752.472 | 4072 | 269648.944 | 33440160.9 | 277352.436 |
| mtART + F + G4 | 124656.265 | 4091 | 257494.53 | 33738238.5 | 265233.967 |
| mtZOA + G4 | 126309.547 | 4072 | 260763.094 | 33431275.1 | 268466.586 |
| mtZOA + F + G4 | 122039.936 | 4091 | 252261.873 | 33733005.9 | 260001.31 |
| mtMet + G4 | 127023.696 | 4072 | 262191.392 | 33432703.4 | 269894.884 |
| mtMet + F + G4 | 121736.553 | 4091 | 251655.106 | 33732399.1 | 259394.542 |
| mtVer + G4 | 129268.339 | 4072 | 266680.678 | 33437192.7 | 274384.171 |
| mtVer + F + G4 | 124100.301 | 4091 | 256382.601 | 33737126.6 | 264122.038 |
| mtInv + G4 | 126775.212 | 4072 | 261694.425 | 33432206.4 | 269397.917 |
| mtInv + F + G4 | 120370.355 | 4091 | 248922.709 | 33729666.7 | 256662.146 |
| mtMAM + G4 | 131950.378 | 4072 | 272044.757 | 33442556.8 | 279748.249 |
| mtMAM + F + G4 | 126196.539 | 4091 | 260575.079 | 33741319.1 | 268314.515 |
| HIVb + G4 | 122513.558 | 4072 | 253171.116 | 33423683.1 | 260874.608 |
| HIVb + F + G4 | 123247.507 | 4091 | 254677.014 | 33735421 | 262416.451 |
| HIVw + G4 | 127543.628 | 4072 | 263231.256 | 33433743.3 | 270934.749 |
| HIVw + F + G4 | 126951.314 | 4091 | 262084.629 | 33742828.6 | 269824.066 |
| FLU + G4 | 122300.586 | 4072 | 252745.171 | 33423257.2 | 260448.663 |
| FLU + F + G4 | 123081.967 | 4091 | 254345.934 | 33735089.9 | 262085.371 |
| rtREV + G4 | 119057.976 | 4072 | 246259.953 | 33416772 | 253963.445 |
| rtREV + F + G4 | 119052.974 | 4091 | 246287.948 | 33727031.9 | 254027.385 |
| cpREV + G4 | 119089.943 | 4072 | 246323.886 | 33416835.9 | 254027.378 |
| cpREV + F + G4 | 119416.158 | 4091 | 247014.317 | 33727758.3 | 254753.754 |

TABLE 7
A. Pertains to FIG. 13B.

| FIG. | Contig | Feature | | | |
|---|---|---|---|---|---|
| Subpanel | accession | of interest | start | end | strand |
| 31B (K. racemifer - IsrB) | NZ_ADVG01000004 | IsrB | 697010 | 698075 | 1 |
| 31B (K. racemifer - IscB) | NZ_ADVG01000003 | IscB | 1400692 | 1401982 | 1 |
| 31B (Bacteriodales RUG11478) | CACXPM010000003.1 | IscB | 91847 | 93110 | −1 |
| 31B (Tissierellia AS22ysBPME_61) | JAAZKS010000250.1 | IscB | 1343 | 2939 | −1 |
| 31B (Armatimonadota) | Ga0315277_10040887 | Cas9 | 1829 | 3848 | 1 |
| 31B (Nitrospirae RBG_13_39_12) | MHEF01000135.1 | Cas9 | 1737 | 4026 | 1 |
| 31B (C. jejuni strain NCTC 11168) | SZUC01000003.1 | Cas9 | 186809 | 189764 | −1 |

B. Pertains to FIG. 14C, H.

| FIG. | Contig | Feature | | | |
|---|---|---|---|---|---|
| Subpanel | accession | of interest | start | end | strand |
| 14C | KY407659 | IscB | 21119 | 22433 | −1 |
| 14H | NZ_ADVG01000001 | IsrB | 978948 | 980013 | −1 |

### DISCUSSION

[0847] Naturally programmable biological systems offer an efficient solution for diverse organisms to achieve scalable complexity via modularity of their components. RNA-guided defense and regulatory systems, which are widespread in prokaryotes and eukaryotes, are a prominent case in point, and have served as the basis of numerous biotechnology applications thanks to the ease with which they can be engineered and reprogrammed (Hüttenhofer, A., et al. (2006), Nat. Rev. Genet. 7, 475-482; Schneider, A. et al. (2020), EMBO Rep. 21, e51918; Koonin, E. et al. (2017), Biol. Direct. 12 e51918).

[0848] Here, through the exploration of Cas9 evolution, Applicants discovered the programmable RNA-guided mechanism of 3 highly abundant but previously uncharacterized transposon-encoded nucleases: IscB, IsrB, and TnpB, which Applicants collectively refer to as Q2 (OMEGA: Obligate Mobile Element Guided Activity) (FIG. 18) because the mobile element localization and movement likely determines the identity of their guides. Although the biological functions of 22 systems remain unknown, several hypotheses are compatible with the available evidence, including roles in facilitating TnpA-catalyzed, RNA-guided transposition, or acting as a toxin, with the transposon acting as the antitoxin, securing maintenance of IS200/605 insertions (Supplementary Text, below).

[0849] The broad distribution of the (2 systems characterized here indicates that RNA-guided mechanisms are more widespread in prokaryotes than previously suspected and suggests that RNA-guided activities are likely ancient and evolved on multiple, independent occasions, of which only the most common ones have likely been identified so far. The TnpB family is far more abundant and diverse than the IscB family; indeed, Applicants identified more than a million putative tnpB loci in bacterial and archaeal genomes, making it one of the most common prokaryotic genes altogether. These TnpBs might represent an untapped wealth of diverse RNA-guided mechanisms present not only in prokaryotes, but also in eukaryotes. Combined with our identification of a chloroplast-encoded IscB, these findings suggest that the expansion of RNA-guided systems into eukaryotic genomes could be a general phenomenon, and more broadly, that RNA-guided systems are functionally diverse and permeate all domains of life.

### REFERENCES AND NOTES

[0850] 1. F. Zhang, Development of CRISPR-Cas systems for genome editing and beyond. Quarterly Reviews of Biophysics. 52 (2019).
[0851] 2. F. Hille, H. Richter, S. P. Wong, M. Bratovič, S. Ressel, E. Charpentier, The biology of CRISPR-Cas: Backward and forward. Cell. 172, 1239-1259 (2018).
[0852] 3. V. V. Kapitonov, K. S. Makarova, E. V. Koonin, ISC, a novel group of bacterial and Archaeal DNA transposons that encode Cas9 homologs. J. Bacteriol. 198, 797-807 (2015).
[0853] 4. P. Siguier, E. Gourbeyre, M. Chandler, Bacterial insertion sequences: their genomic impact and diversity. FEMS Microbiol. Rev. 38, 865-891 (2014).
[0854] 5. S. Shmakov, A. Smargon, D. Scott, D. Cox, N. Pyzocha, W. Yan, O. O. Abudayyeh, J. S. Gootenberg, K. S. Makarova, Y. I. Wolf, K. Severinov, F. Zhang, E. V. Koonin, Diversity and evolution of class 2 CRISPR-Cas systems. Nat. Rev. Microbiol. 15, 169-182 (2017).
[0855] 6. B. Zetsche, J. S. Gootenberg, O. O. Abudayyeh, I. M. Slaymaker, K. S. Makarova, P. Essletzbichler, S. E. Volz, J. Joung, J. van der Oost, A. Regev, E. V. Koonin, F. Zhang, Cpf1 is a single RNA-guided endonuclease of a class 2 CRISPR-Cas system. Cell. 163, 759-771 (2015).
[0856] 7. E. Deltcheva, K. Chylinski, C. M. Sharma, K. Gonzales, Y. Chao, Z. A. Pirzada, M. R. Eckert, J. Vogel, E. Charpentier, CRISPR RNA maturation by trans-encoded small RNA and host factor RNase III. Nature. 471, 602-607 (2011).
[0857] 8. I. Kalvari, E. P. Nawrocki, N. Ontiveros-Palacios, J. Argasinska, K. Lamkiewicz, M. Marz, S. Griffiths-Jones, C. Toffano-Nioche, D. Gautheret, Z. Weinberg, E. Rivas, S. R. Eddy, R. D. Finn, A. Bateman, A. I. Petrov. Rfam 14: expanded coverage of metagenomic, viral and microRNA families. Nucleic Acids Res. 49, D192-D200 (2021).
[0858] 9. Z. Weinberg, J. Perreault, M. M. Meyer, R. R. Breaker, Exceptional structured noncoding RNAs revealed by bacterial metagenome analysis. Nature. 462, 656-659 (2009).
[0859] 10. M. Jinek, K. Chylinski, I. Fonfara, M. Hauer, J. A. Doudna, E. Charpentier, A programmable dual-RNA-guided DNA endonuclease in adaptive bacterial immunity. Science. 337, 816-821 (2012).
[0860] 11. G. Gasiunas, R. Barrangou, P. Horvath, V. Siksnys, Cas9-crRNA ribonucleoprotein complex mediates specific DNA cleavage for adaptive immunity in bacteria. Proc. Natl. Acad. Sci. U.S.A 109, E2579-86 (2012).
[0861] 12. G. Gasiunas, J. K. Young, T. Karvelis, D. Kazlauskas, T. Urbaitis, M. Jasnauskaite, M. M. Grusyte, S. Paulraj, P.-H. Wang, Z. Hou, S. K. Dooley, M. Cigan, C. Alarcon, N. D. Chilcoat, G. Bigelyte, J. L. Curcuru, M. Mabuchi, Z. Sun, R. T. Fuchs, E. Schildkraut, P. R. Weigele, W. E. Jack, G. B. Robb, Č. Venclovas, V. Siksnys, A catalogue of biochemically diverse CRISPR-Cas9 orthologs. Nat. Commun. 11, 5512 (2020).
[0862] 13. M. Jinek, F. Jiang, D. W. Taylor, S. H. Sternberg, E. Kaya, E. Ma, C. Anders, M. Hauer, K. Zhou, S. Lin, M. Kaplan, A. T. Iavarone, E. Charpentier, E. Nogales, J. A. Doudna, Structures of Cas9 endonucleases reveal RNA-mediated conformational activation. Science. 343, 1247997 (2014).
[0863] 14. B. Q. Minh, H. A. Schmidt, O. Chernomor, D. Schrempf, M. D. Woodhams, A. von Haeseler, R. Lanfear, IQ-TREE 2: New Models and Efficient Methods for Phylogenetic Inference in the Genomic Era. Mol. Biol. Evol. 37, 1530-1534 (2020).
[0864] 15. K. S. Makarova, Y. I. Wolf, J. Iranzo, S. A. Shmakov, O. S. Alkhnbashi, S. J. J. Brouns, E. Charpentier, D. Cheng, D. H. Haft, P. Horvath, S. Moineau, F. J. M. Mojica, D. Scott, S. A. Shah, V. Siksnys, M. P. Terns, Č. Venclovas, M. F. White, A. F. Yakunin, W. Yan, F. Zhang, R. A. Garrett, R. Backofen, J. van der Oost, R. Barrangou, E. V. Koonin, Evolutionary classification of CRISPR-Cas systems: a burst of class 2 and derived variants. Nat. Rev. Microbiol. 18, 67-83 (2020).
[0865] 16. K. A. Majorek, S. Dunin-Horkawicz, K. Steczkiewicz, A. Muszewska, M. Nowotny, K. Ginalski, J. M. Bujnicki, The RNase H-like superfamily: new members, comparative structural analysis and evolutionary classification. Nucleic Acids Res. 42, 4160-4179 (2014).
[0866] 17. H. Nishimasu, F. A. Ran, P. D. Hsu, S. Konermann, S. I. Shehata, N. Dohmae, R. Ishitani, F. Zhang, O. Nureki, Crystal structure of Cas9 in complex with guide RNA and target DNA. Cell. 156, 935-949 (2014).
[0867] 18. W. Bao, J. Jurka, Homologues of bacterial TnpB_IS605 are widespread in diverse eukaryotic transposable elements. Mob. DNA. 4, 12 (2013).
[0868] 19. J. V. Gomes-Filho, L. S. Zaramela, V. C. da S. Italiani, N. S. Baliga, R. Z. N. Vêncio, T. Koide, Sense overlapping transcripts in IS1341-type transposase genes are functional non-coding RNAs in archaea. RNA Biol. 12, 490-500 (2015).
[0869] 20. Z. Weinberg, C. E. Lunse, K. A. Corbino, T. D. Ames, J. W. Nelson, A. Roth, K. R. Perkins, M. E. Sherlock, R. R. Breaker, Detection of 224 candidate structured RNAs by comparative analysis of specific subsets of intergenic regions. Nucleic Acids Res. 45, 10811-10823 (2017).
[0870] 21. A. Hüttenhofer, P. Schattner, The principles of guiding by RNA: chimeric RNA-protein enzymes. Nat. Rev. Genet. 7, 475-482 (2006).
[0871] 22. A. Schneider, A short history of guide RNAs: The intricate path that led to the discovery of a basic biological concept. EMBO Rep. 21, e51918 (2020).
[0872] 23. E. V. Koonin, Evolution of RNA- and DNA-guided antivirus defense systems in prokaryotes and eukaryotes: common ancestry vs convergence. Biol. Direct. 12 (2017).
[0873] 24. H. Altae-Tran, S. Kannan, F. Zhang, Code and processed data for: The widespread IS200/605 transposon family encodes diverse programmable RNA-guided endonucleases, Version 1.0, Zenodo (2021); <link to be inserted after official acceptance of manuscript>.
[0874] 25. C. Camacho, G. Coulouris, V. Avagyan, N. Ma, J. Papadopoulos, K. Bealer, T. L. Madden, BLAST+: architecture and applications. BMC Bioinformatics. 10, 421 (2009).
[0875] 26. K. Katoh, D. M. Standley, MAFFT multiple sequence alignment software version 7: improvements in performance and usability. Mol. Biol. Evol. 30, 772-780 (2013).
[0876] 27. M. Steinegger, J. Söding, MMseqs2 enables sensitive protein sequence searching for the analysis of massive data sets. Nat. Biotechnol. 35, 1026-1028 (2017).
[0877] 28. M. Steinegger, M. Meier, M. Mirdita, H. Vöhringer, S. J. Haunsberger, J. Söding, HH-suite3 for fast remote homology detection and deep protein annotation. BMC Bioinformatics. 20, 473 (2019).
[0878] 29. S. R. Eddy, Accelerated Profile HMM Searches. PLoS Comput. Biol. 7, e1002195 (2011).
[0879] 30. S. A. Shmakov, K. S. Makarova, Y. I. Wolf, K. V. Severinov, E. V. Koonin, Systematic prediction of genes functionally linked to CRISPR-Cas systems by gene neighborhood analysis. Proc. Natl. Acad. Sci. U.S.A 115, E5307-E5316 (2018).
[0880] 31. A. B. Crawley, J. R. Henriksen, R. Barrangou, CRISPRdisco: An Automated Pipeline for the Discovery and Analysis of CRISPR-Cas Systems. CRISPR J. 1, 171-181 (2018).
[0881] 32. D. H. Haft, B. J. Loftus, D. L. Richardson, F. Yang, J. A. Eisen, I. T. Paulsen, O. White, TIGRFAMs: a protein family resource for the functional identification of proteins. Nucleic Acids Res. 29, 41-43 (2001).
[0882] 33. A. Delcher, Improved microbial gene identification with GLIMMER. Nucleic Acids Research. 27 (1999), pp. 4636-4641.
[0883] 34. S. Naser-Khdour, B. Q. Minh, W. Zhang, E. A. Stone, R. Lanfear, The Prevalence and Impact of Model Violations in Phylogenetic Analysis. Genome Biol. Evol. 11, 3341-3352 (2019).
[0884] 35. S. Kalyaanamoorthy, B. Q. Minh, T. K. F. Wong, A. von Haeseler, L. S. Jermiin, ModelFinder: fast model selection for accurate phylogenetic estimates. Nat. Methods. 14, 587-589 (2017).
[0885] 36. M. N. Price, P. S. Dehal, A. P. Arkin, FastTree 2—approximately maximum-likelihood trees for large alignments. PLoS One. 5, e9490 (2010).
[0886] 37. G. Altekar, S. Dwarkadas, J. P. Huelsenbeck, F. Ronquist, Parallel Metropolis coupled Markov chain Monte Carlo for ian posterian phylogenetic inference. Bioinformatics. 20, 407-415 (2004).
[0887] 38. A. Stamatakis, RAXML version 8: a tool for phylogenetic analysis and post-analysis of large phylogenies. Bioinformatics. 30, 1312-1313 (2014).
[0888] 39. R. Lorenz, S. H. Bernhart, C. H. zu Siederdissen, H. Tafer, C. Flamm, P. F. Stadler, I. L. Hofacker, ViennaRNA Package 2.0. Algorithms Mol. Biol. 6, 1-14 (2011).
[0889] 40. E. Rivas, J. Clements, S. R. Eddy, A statistical test for conserved RNA structure shows lack of evidence for structure in lncRNAs. Nat. Methods. 14, 45-48 (2017).
[0890] 41. E. P. Nawrocki, S. R. Eddy, Infernal 1.1:100-fold faster RNA homology searches. Bioinformatics. 29, 2933-2935 (2013).
[0891] 42. Z. Weinberg, R. R. Breaker, R2R—software to speed the depiction of aesthetic consensus RNA secondary structures. BMC Bioinformatics. 12, 3 (2011).
[0892] 43. J. Mistry, S. Chuguransky, L. Williams, M. Qureshi, G. A. Salazar, E. L. L. Sonnhammer, S. C. E. Tosatto, L. Paladin, S. Raj, L. J. Richardson, R. D. Finn, A. Bateman, Pfam: The protein families database in 2021. Nucleic Acids Res. 49, D412-D419 (2021).
[0893] 44. C. Bland, T. L. Ramsey, F. Sabree, M. Lowe, K. Brown, N. C. Kyrpides, P. Hugenholtz, CRISPR recognition tool (CRT): a tool for automatic detection of clustered regularly interspaced palindromic repeats. BMC Bioinformatics. 8, 209 (2007).
[0894] 45. F. Asnicar, G. Weingart, T. L. Tickle, C. Huttenhower, N. Segata, Compact graphical representation of phylogenetic data and metadata with GraPhlAn. PeerJ. 3, e1029 (2015).
[0895] 46. L. Maaten, G. Hinton, Visualizing Data using t-SNE. Journal of machine learning research. 9, 2579-2605 (2008).
[0896] 47. P. G. Poličar, M. Stražar, B. Zupan, Embedding to reference t-SNE space addresses batch effects in single-cell classification. bioRxiv (2019), doi: 10.1101/671404.
[0897] 48. P. J. Rousseeuw, Silhouettes: A graphical aid to the interpretation and validation of cluster analysis. J. Comput. Appl. Math. 20, 53-65 (1987).
[0898] 49. R. J. G. B. Campello, D. Moulavi, J. Sander, in Advances in Knowledge Discovery and Data Mining (Springer Berlin Heidelberg, Berlin, Heidelberg, 2013), Lecture notes in computer science, pp. 160-172.
[0899] 50. D. H. Parks, M. Imelfort, C. T. Skennerton, P. Hugenholtz, G. W. Tyson, CheckM: assessing the quality of microbial genomes recovered from isolates, single cells, and metagenomes. Genome Res. 25, 1043-1055 (2015).
[0900] 51. P.-A. Chaumeil, A. J. Mussig, P. Hugenholtz, D. H. Parks, GTDB-Tk: a toolkit to classify genomes with the Genome Taxonomy Database. Bioinformatics (2019), doi: 10.1093/bioinformatics/btz848.
[0901] 52. S. Frey, D. Görlich, A new set of highly efficient, tag-cleaving proteases for purifying recombinant proteins. J. Chromatogr. A. 1337, 95-105 (2014).
[0902] 53. M. Martin, Cutadapt removes adapter sequences from high-throughput sequencing reads. EMBnet.journal. 17, 10-12 (2011).
[0903] 54. B. Langmead, S. L. Salzberg, Fast gapped-read alignment with Bowtie 2. Nat. Methods. 9, 357-359 (2012).
[0904] 55. A. M. Sriramachandran, G. Petrosino, M. Méndez-Lago, A. J. Schäfer, L. S. Batista-Nascimento, N. Zilio, H. D. Ulrich, Genome-wide Nucleotide-Resolution Mapping of DNA Replication Patterns, Single-Strand Breaks, and Lesions by GLOE-Seq. Mol. Cell. 78, 975-985.e7 (2020).
[0905] 56. K. Clement, H. Rees, M. C. Canver, J. M. Gehrke, R. Farouni, J. Y. Hsu, M. A. Cole, D. R. Liu, J. K. Joung, D. E. Bauer, L. Pinello, CRISPResso2 provides accurate and rapid genome editing sequence analysis. Nat. Biotechnol. 37, 224-226 (2019).
[0906] 57. A. Bankevich, S. Nurk, D. Antipov, A. A. Gurevich, M. Dvorkin, A. S. Kulikov, V. M. Lesin, S. I. Nikolenko, S. Pham, A. D. Prjibelski, A. V. Pyshkin, A. V. Sirotkin, N. Vyahhi, G. Tesler, M. A. Alekseyev, P. A. Pevzner, SPAdes: a new genome assembly algorithm and its applications to single-cell sequencing. J. Comput. Biol. 19, 455-477 (2012).
[0907] 58. M. Turmel, C. Otis, C. Lemieux, Divergent copies of the large inverted repeat in the chloroplast genomes of ulvophycean green algae. Sci. Rep. 7, 994 (2017).
[0908] 59. D. T. Hoang, O. Chernomor, A. von Haeseler, B. Q. Minh, L. S. Vinh, UFBoot2: Improving the Ultrafast Bootstrap Approximation. Mol. Biol. Evol. 35, 518-522 (2018).
[0909] 60. P. J. Lockhart, A. W. Larkum, M. Steel, P. J. Waddell, D. Penny, Evolution of chlorophyll and bacteriochlorophyll: the problem of invariant sites in sequence analysis. Proc. Natl. Acad. Sci. U.S.A 93, 1930-1934 (1996).
[0910] 61. A. Criscuolo, S. Gribaldo, BMGE (Block Mapping and Gathering with Entropy): a new software for selection of phylogenetic informative regions from multiple sequence alignments. BMC Evol. Biol. 10, 210 (2010).
[0911] 62. J. Strecker, A. Ladha, Z. Gardner, J. L. Schmid-Burgk, K. S. Makarova, E. V. Koonin, F. Zhang, RNA-guided DNA insertion with CRISPR-associated transposases. Science. 365, 48-53 (2019).
[0912] 63. S. E. Klompe, P. L. H. Vo, T. S. Halpin-Healy, S. H. Sternberg, Transposon-encoded CRISPR-Cas systems direct RNA-guided DNA integration. Nature. 571, 219-225 (2019).
[0913] 64. M. Krupovic, K. S. Makarova, P. Forterre, D. Prangishvili, E. V. Koonin, Casposons: a new superfamily of self-synthesizing DNA transposons at the origin of prokaryotic CRISPR-Cas immunity. BMC Biol. 12, 1-12 (2014).
[0914] 65. S. M. Crotty, B. Q. Minh, N. G. Bean, B. R. Holland, J. Tuke, L. S. Jermiin, A. V. Haeseler, GHOST: Recovering Historical Signal from Heterotachously Evolved Sequence Alignments. Syst. Biol. 69, 249-264 (2020).

### Example 2

[0915] FIG. 62 shows reclustering CRISPR-associated IscB polypeptide at 60% sequence identity reveals novel IscB proteins. The IscB proteins comprise an X domain and a Y domain. CRISPR-associated IscB proteins from 00644 cluster were functional with an NAC PAM (FIG. 63A showing IscB protein of locus JGI accession Gaa0099850_1002913; FIG. 63B showing IscB protein of JGI accession Ga0348337_018242; FIG. 63C showing IscB protein of locus JGI accession Ga0208542 1002724).

### Materials and Methods

### Profile Curation

[0916] Initial IsrB sequences were curated using NCBI's PSI-BLAST on the NR database with 8 iterations from a starting seed sequence up to a maximum of 20000 target sequences (Camacho, C. et al. (2009), BMC Bioinformatics. 10, 421). Strong filtering parameters (expect threshold of 1e-5 and PSI-BLAST threshold of 1e-6) were selected to reduce the accumulation of unrelated proteins also containing HNH domains, such as restriction enzymes or homing endonucleases. All proteins smaller than 260 aa were discarded. The remaining proteins were then aligned using MAFFT FFT-NS-1 and partial proteins as well as proteins with poor alignment coverage to the HNH domain were discarded (Kotah, K., et al. (2013), Mol. Biol. Evol. 30, 772-780). The filtered set was then clustered using MMSeqs2 at 70% sequence identity with a minimum coverage of 70%. The MMSeqs2 representatives for each cluster were then aligned using MAFFT-einsi (Steinegger, M. et al. (2017), Nat. Biotechnol. 35, 1026-1028). The resulting alignment was further split into multiple domains (PLMP, RuvC-I, RuvC-II, HNH, and RuvC-III) in order to create distinct HHAlign profiles for the respective regions (Steinegger, M. et al. (2019), BMC Bioinformatics. 20, 473). For HMMER profiles, the PLMP, HNH, and RuvC-III were used to create separate profiles. RuvC-I, BH, and RuvC-II were combined into a single HMMER profile to reduce false positives (Eddy, S., et al. (2018), Proc. Natl. Acad. Sci. U.S.A 115, E5307-E5316).

[0917] Due to the extensive diversity in TnpA, a PSI-BLAST search resulted in more than 20000 homologous sequences. Because TnpA consists of a single contiguous catalytic domain, HHblits was instead used to identify more non-redundant homologs using an E-value cutoff of 1e-3, minimum hit probability of 80% and 8 iterations on the UniRef30_2020_06 database (Steinegger, M. et al. (2019), BMC Bioinformatics. 20, 473). The resulting proteins were aligned using MAFFT-einsi, and partial proteins were removed (Kotah, K., et al. (2013), Mol. Biol. Evol. 30, 772-780). The resulting alignment was used to create an HMMER profile.

### Identification of IseB, IsrB, and IshA

[0918] All prokaryotic (bacterial+ archaeal) genomes were downloaded from NCBI, and NCBI WGS, as well as JGI projects for which express permission was given, and were combined into a single prokaryotic database. ORFs on all contigs were predicted with TTG, TAG, and TAA stop codons, and ATG start codons (with a minimum size of 55 aa), allowing for alternative start codons GTG (if it produced a minimum ORF size of 100 aa), TTG (if it produced a minimum ORF size of 100 aa) or CTG (if it produced a minimum ORF size of 300 aa). In the case of multiple potential start sites with different start codons for the same potential ORF, all potential start sites were listed in order of increasing corresponding ORF size. A best start site was iteratively selected by traversing the list and selecting a new best start site based on the previous one with the first item in the list selected as the initial best. GTG/TTG start sites were accepted as best if they would make the ORF 20 aa longer than the current best start site, while CTG was accepted only if it would make the protein 40 aa longer than the current best start site. Any ATG start site larger than the current best was automatically selected. ORFs sharing the same stop location and strand (+/−) as an existing protein annotation were discarded in favor of the existing annotation. All ORFs were then searched using HMMER and the 4 IscB profiles with a minimum bit score of 18. Any ORF/protein with a hit to any of the 4 domains was considered a protein of interest (POI) and retained for further analysis. For redundancy reduction, all proteins were then clustered using MMSeqs2 at 90% sequence identity with 85% coverage. Within each 90% cluster, proteins smaller than the 80th percentile in length were discarded. Of the remaining proteins, proteins containing X (ambiguous) amino acids were discarded unless their removal would result in an empty set of sequences. Of the remaining proteins, the sequence with the largest minimum distance from either the start or the end of the protein-coding sequence to the edge of the respective contig, that is, the protein sequence farthest away from either edge of the containing contig, was selected as the cluster representative. Representative proteins with start or end sites within 200 bp of contig edges were considered partial and were subsequently discarded. These remaining representative sequences constituted non-redundant POIs. The non-redundant POIs were then further clustered into “clusters” (as opposed to non-redundant sequences) using MMSeqs2 at 65% sequence identity and 70% sequence coverage. For each cluster, the representative sequence was taken to be the sequence with the 90th percentile length in the cluster. The use of 90th percentile reflect the skew towards protein fragments that are often observed in large clusters. Unless specified otherwise, when referring to a cluster's components, such as the protein ORF (e.g. IscB cluster 2089) or associated RNA sequence (e.g. 2089 ncRNA), it is the respective component of the representative locus for that cluster that is being referenced.

### IscB-IsrB-Cas9 Ruv (BH and RuvC BH HNH Domain Based Phylogenetic Analysis

[0919] Cas9s identified from the IsrB domain-based search exhibited monophyletic branching from a RuvC-based tree, however not all Cas9s were identified from this search. To expand the space of Cas9s included in the analysis, Cas9 profiles from the Koonin Lab (30), TIGRFAM, and profiles made from MAFFT alignments of Cas9 proteins from CRISPRDisco were used to identify additional Cas9 proteins not found in the initial IsrB domain-based search using HMMER with a minimum bit score of 25 and protein length of 500 aa (Kotah, K. et al. (2013), Mol. Biol. Evol. 30, 772-780; Crawley, A. et al. (2018), CRISPR J. 1, 171-181; Haft, D. et al. (2001), Nucleic Acids Res. 29, 41-43). Cas9 proteins from the IsrB domain search were combined with the Cas9 proteins from the Cas9 search and deduplicated. The Cas9 ORF start sites were then refined using GLIMMER (Delcher, A, et al. (1999), Nucleic Acids Res. 29, 41-43). The superset of Cas9 proteins were then clustered 90% sequence identity with 85% coverage and redundancy reduced in the same manner as for the IsrB search. The superset of non-redundant Cas9 proteins were then reclustered at 50% sequence identity and 60% coverage. The choice of 50% sequence identity reflects the difference in the size of conserved regions between IsrBs and Cas9s with approximately 100 aa more slowly evolving in the key regions (RuvC, BH, and HNH). The clustering criteria of 65% minimum sequence identity for 400 aa proteins is functionally similar to 65%-100/400+100/1000=50% sequence identity for larger 1000 aa Cas9s with the same conserved domains spanning approximately 100 aa. For each cluster, the representative sequence was taken to be the sequence with the 90th percentile length in the cluster.

[0920] Clusters were additionally filtered for homology to IsrB/Cas9 catalytic domains using profile-profile comparison. Specifically, for each cluster, the non-redundant sequences in the cluster were aligned using MAFFT in order to generate hhm inputs for HHAlign. These resulting alignments were then compared to the 6 IscB domain alignments using HHAlign (for IscB/IsrB clusters), or the corresponding 8 Cas9 domain hhm profiles of the equivalent regions (RuvC-I, Bridge Helix, REC1, REC2, RuvC-II, HNH, RuvC-III). IscB/IsrB clusters were selected for further analysis if at least two hits to any of the IscB RuvC-I, RuvC-II, or RuvC-III domains were identified through HHAlign (with a minimum bit score of 17). Cas9 clusters were selected for further analysis if at least two hits to any of the IscB RuvC-I, RuvC-II, or RuvC-III domains were identified through HHAlign (with a minimum bit score of 17), or if any two hits to the Cas9 RuvC-I, RuvC-II, RuvC-III domains were identified through HHAlign (with a minimum bit score of 17). The passing Cas9 clusters were then pooled with the passing IscB clusters for phylogenetic analysis.

[0921] IscB, IsrB and Cas9 obtained from the above filtering criteria were aligned using MAFFT-x2 (two iterations) and BLOSUM62 scoring (default if not otherwise specified). The RuvC-I and BH regions of Cas9 did not align with the RuvC-I and BH regions of IscB and IsrB due to the different domain architectures and sizes of these divergent protein families. RuvC-I and BH were manually grouped and realigned using MAFFT-x2. Sequences with poor coverage at the RuvC-I domain region of the alignment were removed if their HHAlign score to either the IscB-RuvC-I or Cas9-RuvC-I profiles were less than 21. Small proteins with both Cas9-like and IscB-like sequences containing HHAlign hits to RuvC-I and BH typically did not have correct alignments with RuvC-I and BH relative to all other proteins due to their hybrid nature. For such proteins, all amino acids between the N-terminus and RuvC-II were grouped together as RuvC-I and BH for alignment. RuvC-I and BH regions were then realigned using MAFFT-linsi. IsrB aligned columns from the HNH domain were moved to the RuvC-II column group. RuvC-II, RuvC-III, HNH, and PLMP domains were then sequentially aligned using MAFFT-linsi. Excess regions between the BH domain and RuvC-II were then aligned using MAFFT-einsi and BLOSUM30 for identification of REC-like insertions. Sequences with no or poor alignment to any of the RuvC or BH domains were removed. The resulting alignment was then used for phylogenetic analysis.

[0922] All domains not common to all 3 types of proteins, namely PLMP, REC1, REC2, PI domains, and IscB/IsrB C-terminal domains were removed from the alignment, leaving a trimmed alignment containing only the highly conserved portions of the RuvC-I, BH, RuvC-II, and RuvC-III domains, creating a RuvC/BH alignment containing IscB, IsrB, and Cas9. Another alignment was created containing only RuvC-I, BH, RuvC-II, HNH, and RuvC-III domains for only IscB and Cas9, termed the RuvC/BH/HNH alignment. For both of these alignments, clusters with dead representative sequences (sequences with key catalytic sites mutated) were removed. Specifically, the positions filtered were the RuvC-I conserved D, RuvC-II conserved E, HNH Conserved H (when applicable), and RuvC-III conserved D and H. Positions (columns) with more than 75% gaps were also removed. Symmetry tests implemented in IQ-Tree 2 were used to identify potential phylogenetic violations for the alignments (FIG. 22) (Naser-Khdour, S. et al. (2019), Genome Biol. Evol. 11, 3341-3352). The RuvC/BH/HNH alignment displayed significant violation to the stationarity assumption of the three main assumptions used in typical phylogenetic analysis (reversibility, stationarity, homogeneity). As the alignment contained too many taxa for the use of heterotachy models in IQ-Tree 2, Applicants use a subtractive approach to identify the source of the stationarity violation. Preliminary analyses showed that the major clade of II-B Cas9s consistently split from the rest of Cas9s with a branch length of ≥1, suggesting its accurate placement along the tree might be difficult. Applicants removed the major clade of II-B Cas9s from the RuvC/BH/HNH alignment, which substantially reduced the stationarity violation as determined by marginal symmetry test p-value (FIG. 22). Applicants also created another alignment only consisting of IscB and Cas9s from the early stages of Cas9 evolution, which completely eliminated any stationarity violation. For both of these additional alignments, catalytically inactive variants were removed as described for the RuvC/BH and RuvC/BH/HNH alignments, and positions (columns) with more than 75% gaps were removed. For each alignment, substitution model selection was performed using the ModelFinder tool implemented in IQ-Tree 2 (Kalyaanamoorthy, S. et al. (2017), Nat. Methods. 14, 587-589). Optimal models were selected using the Akaike Information Criterion corrected for small sample sizes (AICc). In most cases, the AICc best model differed from the Bayesian Information Criterion (BIC) or AIC (standard Akaike Information Criterion), and some analyses were run for both sets of models; however, AICc was generally preferred due the small sample size correction. Then, for each alignment, phylogenetic trees were built using multiple methods for cross comparison (IQ-Tree 2, RAXML, MrBayes). While FastTree2 was used for quick visualizations of phylogenetic information, the likelihood scores obtained using this method were substantially worse than those for IQ-Tree 2, RAXML, or MrBayes (Mihn, B., et al. (2020), Mol. Biol. Evol. 37, 1530-1534; Price, M., et al. (2010), PLOS One. 5, e9490; Altekar, G. et al. (2004), Bioinformatics. 20, 407-415; Stamatakis, A. et al. (2014), Bioinformatics. 30, 1312-1313). As a result, FastTree2 was not used for comprehensive cross comparisons.

[0923] For FIG. 9A, a hybrid tree approach was used in order to condense the information pertinent to Cas9 while maintaining phylogenetic accuracy. For this approach, a subsample of Cas9 clusters were selected from the alignment, in addition to the complete set of IscB and IsrBs. The resulting sub-alignment was then used for phylogenetic inference using IQ-Tree 2 with identical parameters. Due to the potentially skewed Cas9 related information present in the sub-alignment, placement of the Cas9 lineage was inferred from the tree built with the original alignment. This was done by detaching the Cas9 branch from the sub alignment tree and replacing the original Cas9 branch on the original tree with the smaller detached branch. The branch selected for grafting was the branching between Cas9_849 and all other Cas9s, as this region shared the same topology between both trees. The ordering of Cas9 subtype evolution was checked for consistency between each tree to ensure compatibility after having substantially downsampled Cas9 proteins.

### IscB/IsrB ωRNA Discovery, Curation, and Analysis

[0924] Using results from just the IscB domain search, all representatives from clusters with at least 3 proteins and at least 2 HHAlign hits to any of RuvC-I, RuvC-II, or RuvC-III with at least 17 bit score were collected. All regions upstream (−300 bp to +200 bp of the start codon), and downstream (−200 bp to +300 bp of the stop codon) for all IscB and IsrB proteins were aligned separately using MAFFT-einsi. The upstream alignment demonstrated large conserved regions outside of the typical CDS boundaries of the IscB/IsrB. The downstream alignment did not contain any large conserved region and was discarded for further analysis. Individual sequences in the conserved upstream region were folded using ViennaRNA RNAFold (Lorenz, R. et al. (2011), Algorithms Mol. Biol. 6, 1-14). Sequences in the alignment were split into separate groups on the basis of conservation to key distinct regions in the alignment. The main group was labeled G1a and spanned a large number of IscB ωRNAs. R-scape was used to infer covariance-folded RNA structures that correct for phylogenetic correlations (Rivas, E. et al. (2017), Nat. Methods. 14, 45-48). The R-scape parameters used for all profiles was an E-value threshold of 1e-2 and a gap threshold of 0.75. CMbuild from Infernal was used to optimize the RNA alignments and build covariance models (CMs) (Nawrocki, E. et al. (2013), Bioinformatics. 29, 2933-2935). R2R was used to visualize the resulting RNA structures (Weinberg, Z. et al. (2011), BMC Bioinformatics. 12, 3). Additional alignment groups for IscB/IsrB ωRNAs (G1b-i) were iteratively created based on conserved upstream regions (relative to the ORF) from clades of IscB/IsrB in the RuvC tree that were not strongly associated with existing ωRNA groups. Models for these groups were built in the same manner, except the consensus secondary structure identified using ViennaRNA was used in place of the R-scape structure when the sample size was too small to permit an accurate covariance-folded structure. Due to this small sample size for the CRISPR-associated IscB ncRNA, nucleotides with ≥97% identity and nucleotides with ≥90% identity are the same by definition and were displayed as being ≥90% to avoid overstating their level of conservation in the presence of limited data. Pseudoknots were not explicitly encoded in the covariance models for Infernal. The structure for the hybrid CRISPR/ωRNA associated with CRISPR-associated IscBs was inferred in the same way, using the consensus secondary structure in lieu of the covariance-folded structure due to small sample size.

[0925] All IscB/IsrB ωRNA CM profiles were then searched against the prokaryotic database using cmsearch with a minimum bit score of 20 to identify potential ωRNAs (Nawrocki, E. et al. (2013), Bioinformatics. 29, 2933-2935).

[0926] Overlapping profile hits were resolved by assigning the group of overlapping hits to the profile hit that produced the highest bit score. ωRNAs were annotated using the natural target search analysis

### Natural Target Search

[0927] For the target search, a separate database was curated consisting of plasmids and bacteriophage/archaeal viruses from the NCBI microbial genomes portal. The 30 bp upstream from each ωRNA scaffold as determined by CMsearch along with the generated profiles was used as the corresponding guide sequence for that ωRNA. Guides were then searched against the prokaryotic database or the plasmid/viral database for potential spacer matches using a minimum bit score cutoff of 44. To remove candidate target hits that are related to the original guide/ωRNA pair, a separate pruning step was performed. For each target hit, the corresponding ωRNA scaffold of the guide that generated the hit was separately blasted against a 300 bp window around the target. For this second search, if the ωRNA scaffold had a match within the window with a bit score of 44 or higher and was found within 15 bp of the identified target, the target was discarded for being too similar to the original locus.

[0928] Target hits were then searched for evidence of transposition. For each guide/target pair, the sequence consisting of up to 2000 bp downstream from the end of the ωRNA scaffold was used as a 3′ prime seed. This seed region was then searched against the target contig using blastn with a minimum bit score of 44. Hits from this search were discarded if the strand was not the same as the guide/target match strand. Moreover, hits that were not both ≤50 bp downstream from the guide/target match site and ≤15 bp upstream from the guide/target match site were discarded for being implausible insertion sites. If any 3′ seed hits remained at this stage, the guide/target pair was considered to be associated with transposon insertion/transposition. In this case, of the remaining 3′ seed hits, the most upstream hit was selected, which along with the guide/target site demarcated the 3′ insertion site flanking region and 5′ insertion site flanking region respectively. Guide/target pairs that did not have an identifiable 3′ insertion site flanking region were not considered insertion linked and were discarded unless their guide/target match bit score was ≥50, which approximately corresponded to an E-value of 0.02 for the given size of the prokaryotic database.

[0929] To determine if prophage sequences might be a target for ωRNAs, all guide/target pairs were analyzed to detect if the guide targeted ORFs. Specifically, a guide was considered ORF targeting if any corresponding target was found to overlap with an ORF in the given database. All targeted ORFs were then searched for possible PFAM hits using HMMER and the Pfam34 database (Mistry, S. et al. (2021), Nucleic Acids Res. 49, D412-D419) and a minimum bit score of 18. All ORFs that had any hit to any phage Pfam profiles listed in Table 12 were considered phage targets, and the corresponding guide was labeled as phage ORF targeting.

[0930] ωRNAs were then further annotated as being near IscB/IsrB fragments based on the presence of any nearby ORF (≤2000 bp) with an HMMER hit of 18 bits or higher to any of the 4 IscB HMM profiles. ωRNAs were then clustered as follows. ωRNA scaffold sequences were clustered at 95% sequence identity using cd-hit-est using only global+/+ strand comparisons.

[0931] Similarly, all spacers were clustered at 95% sequence identity using cd-hit-est using only global+/+ strand comparisons. ωRNAs were then grouped according to both their RNA scaffold cluster id (ωRNA_id) and their spacer cluster id (spacer_id). Each (ωRNA_id, spacer_id) group was then classified as being associated near IscB if any ωRNA in the group was considered near IscB/IsrB fragments. Then, for each ωRNA_id, the fraction of all (ωRNA_id, spacer_id) pairs considered associated with IscB/IsrBs was computed. If this fraction was ≤0.75, the ωRNA_id was classified as being associated with standalone ωRNAs, and this classification was propagated back to all IscB/IsrB ωRNAs according to their ωRNA_id.

### Anti-Repeat Determination

[0932] For CRISPR associated IscB, IsrBs, and Cas9s, anti-repeats corresponding to likely tracrRNA regions were identified as follows. For each locus, the closest predicted CRISPR array to the locus within 10 kbp of the protein of interest (POI) (namely IscB, IsrB, or Cas9) was selected. If no such array was identified, the analysis was not performed for the given locus. Next, edit distance between each direct repeat in the selected CRISPR array was computed. The resulting edit distance matrix was used to a medoid direct repeat that had the lowest average edit distance to all other direct repeats in the CRISPR array. The medoid direct repeat was then searched against the 10 kbp window around the POI using blastn with a word size of 4. Hits with bit score <20 were discarded. Hits that mapped to any predicted CRISPR array were used for calibration. Specifically, all such CRISPR array matching hits were collected into a list, and the 20^{th} quantile bit score of such hits was denoted the min_crispr_score. Any hit that was found ≤40 bp of any CRISPR array was discarded as a potential anti-repeat due to its high proximity to CRISPR arrays suggesting the hit could simply be another CRISPR direct repeat. Hits occurring inside the protein of interest were also discarded. Remaining hits occurring ≤500 bp from either the POI or any predicted CRISPR array were retained. For each hit in this final list, if the region of the query median direct repeat that produced the hit does not reach ≤3 bp of either edge of the direct repeat, the hit was discarded as a potential anti-repeat due to the likely inability to produce a stable lower stem region for the putative repeat-anti-repeat stem-loop. If any hits remained, these hits were considered anti-repeats for the POI.

[0933] Anti-repeats were then used to predict potential tracrRNAs for specific Cas9s. This process involved taking the anti-repeat region and extending it until the boundary of the neighboring feature (either protein gene or CRISPR array). TracrRNAs were predicted in this manner for the tracrRNAs shown in FIG. 9B.

### Cluster Annotation

[0934] All 10 kb genomic frames (10 kb region around the protein-coding gene of interest (POI)) were collected, and encompassed all unique/non-redundant IscB, IsrB, and Cas9 genes (according to their 90% redundancy reducing clustering id, denoted mc_id). CRISPR arrays were identified using CRT (Bland, C. et al. (2007) BMC Bioinformatics. 8, 209). TnpA was predicted for all ORFs within 10 kb of a POI using HMMER with a minimum bit-score cutoff of 18.0. All ωRNA annotations from the natural target search were merged with the corresponding genomic frames when applicable. RNA profile hits with a bit-score below 35 were discarded. For each genomic frame, all ωRNAs predictions were merged with the POIs according to their genomic locations. All ωRNAs further than 250 bp away from either end of the POI were considered to be unrelated to the POI. Any ωRNAs closer than 250 bp were considered related to the POI, and in the case of multiple such ωRNAs, only the closest one to the POI was considered for tabulation purposes. For each POI, a locus boundary was then computed as follows. A minimal locus interval [L, R] was set to encompass the POI and associated ωRNA when applicable. Then, iteratively, all other ORFs and CRISPR arrays in the contig were considered for addition into the locus interval, upon which a new minimal interval [L′, R′] would be computed to encompass all elements in the locus. Specifically, an ORF was added to the locus if it was ≤1000 bp from the existing interval and contained a Cas1, Cas2, Cas4, or Csn2 HMM profile hit with a minimum bit score of 25 as determined by hmmsearch. CRISPR arrays were included if they were ≤500 bp from the existing interval and contained ≥3 direct repeats and had a median direct repeat length of ≥25 bp. The locus determination process was terminated once no new elements were being added, resulting in a final locus interval [L, R], which Applicants termed the locus bounds. ORFs with HMMER hits to TnpA with a minimum bit score of 14 was then considered mhpA and a part of the locus if they were ≤500 bp away from the locus bounds ([L, R]).

[0935] For tabulation of cluster annotations, all POIs and corresponding locus information were grouped by cluster id (c_id). POIs with ‘X’ amino acids in the sequence translation were discarded. Moreover, POIs with ≤250 bp distance to either edge of the contig were also discarded. The resulting locus features (features within the locus bounds [L, R])), and tnpA association were then used to tabulate aggregate metrics, such as average CRISPR association (fraction of loci in the cluster that have a CRISPR array within the locus bounds), tnpA association, and various cas gene associations. Anti-repeat association rates were also calculated in this way using anti-repeats as determined above, where loci that did not contain a CRISPR directly inside the locus bounds ([L, R]) were considered to not have an anti-repeat. For natural target search tabulations, the associated ωRNA in the locus bounds for POI closest to the POI was used. The fraction of associated ωRNAs in the cluster targeting genomic regions, plasmids, and phage were tabulated. Similarly, the fraction of associated ωRNAs associated with standalone ωRNAs for the cluster was also calculated. Lastly, the fraction of associated ωRNAs in the cluster that demonstrated evidence of insertion/transposition was also computed for each cluster.

[0936] For tabulation of protein domains, the hhm profile for the alignment of non-redundant sequences from the cluster was used to identify domain hits. Specifically, the cluster was considered to have the PLMP domain if the cluster alignment had an HHAlign match to the IscB PLMP domain with a bit score ≥30. Likewise, the cluster was considered to have the HNH domain if the cluster alignment had an HHAlign match to the IscB HNH domain with a bit score ≥25. As the HNH has multiple variants of the motif (often being replaced by HNN as in most Cas9s), the identity of the last amino acid in the HNH motif (e.g. HNH vs HNN) was computed for the cluster according to the corresponding position in alignment of representative sequences used for the phylogenetic analysis.

[0937] The protein length for each cluster was taken to be the non-gapped length of the cluster representative in the alignment containing all IscB, IsrB, and Cas9 cluster representative sequences (IscB_IsrB_Cas9_full_gappy.fasta). The calculated protein length therefore reflected the trimming of large (>50 aa) non-homologous sequences at the protein termini as determined from the IscB_IsrB_Cas9_full_gappy.fasta file. REC-like regions were taken to be the region directly between the Bridge Helix and the RuvC-II domain as found in the alignment of cluster representatives. The REC-like regions are found in IscB_IsrB_Cas9_REC_only.fasta. Lengths of REC-like insertions for each cluster were taken to be the non-gapped lengths from the REC alignment. GraPhlAn was used to visualize the resulting information on different phylogenetic trees (Asnicar, F. et al. (2015), Peer J. 3, e1029).

[0938] Throughout the text, where fraction of loci containing a specific feature are computed, the analysis considered only the non-inactivated IsrB loci, as determined by RuvC/BH alignment, and the non-activated IscB and Cas9 loci as determined by the RuvC/BH/HNH. In addition, proteins from cluster 34507 were also included despite being considered an inactivated cluster because the cluster contains active CRISPR-associated IscB variants.

### IscB/IsrB ωRNA Phylogenetic Analysis

[0939] All iscB/isrB associated ωRNAs from the loci of cluster representatives were collected.

[0940] For CRISPR-associated ωRNAs, the entire region spanning the CRISPR array and the remainder of the ωRNA scaffold was taken to be the corresponding RNA for the system. These RNAs were then converted to DNA sequences and aligned using MAFFT-ginsi to identify conserved regions spanning multiple types of RNAs. A phylogenetic tree was then constructed using IQ-Tree 2 with 5000 rapid bootstraps with hill climbing, a GTR substitution model with 4 Gamma rate categories.

[0941] To analyze the relationship between II-D tracrRNAs and ωRNAs, cmsearch was used to identify if the predicted II-D tracrRNAs contained any homology to IscB/IsrB ωRNAs using the corresponding IscB/IsrB ωRNA profiles. Based on the potential homology determined this way, a small panel of ωRNAs that were highly related to the II-D tracrRNAs were combined with synthetic single guide sequences from II-D systems constructed by concatenating the DR with ‘AAAA’ and the predicted tracrRNA. These combined sequences were then aligned using MAFFT. The resulting alignment was used for Bayesian phylogenetic analysis with MrBayes with 2 chains at a delta temperature of 0.025 with 8 independent runs for 5M generations. A standard GTR model with gamma rates and 4 categories was used.

### Binning of Yellowstone Lake Metagenomes

[0942] Tetranucleotide frequencies of assembled metagenomes (contigs >5 kb) provided an input for the t-stochastic neighbor embedding (t-SNE) analysis, which reduced the data to two dimensions (Maaten, L. et al. (2008), Journal of Machine Learning, 9, 2579-2605). Applicants used openTSNE (Poličar, P. et al. (2019, bioRxiv (2019), doi: 10.1101/671404) because of its speed and scalability. The perplexity parameter was set at 40, while the learning rate and the number of iterations were variable. Typically, both were set to larger values for bigger datasets. A grid search coupled with silhouette scores (Rousseeuw, P. et al. (1987), J. Comput. Appl. Math. 20, 53-65) was used to find optimal parameters for density-based clustering (Campello, R. et al. (2013), Advances in Knowledge Discovery and Data Mining, Lecture Notes in Computer Science, pp. 160-172) (HDBSCAN) of data points from the t-SNE plot (MD and WPI, in preparation). DNA sequences were grouped into metagenome-assembled genomes (MAGs), and their completeness was evaluated using CheckM (Parks, D. et al. (2015), Genome Res. 25, 1043-1055). The GTDB Toolkit (Chaumeil, P. et al. (2019), Bioinformatics doi: 10.1093/bioinformatics/btz848) was used to classify MAGs into taxonomic groups based on the Genome Taxonomy Database.

### Identification of Guide Encoding Mechanisms for IscB_IsrB ωRNA

[0943] Upon complete classification and curation of all major ωRNA types according to IscB and IsrB, the genome of K. racemifer was searched for all instances of IscB and IsrB using HMMER with the previously described profiles. The genome was also searched for all instances of IscB/IsrB ωRNAs using CMsearch with the G1a-G1i RNA covariance models. Occurrences of multiple nearly identical IscBs associated with nearly identical ωRNAs were identified with BLASTn and was classified as transposon expansion. Occurrences of ωRNAs without detectable IscBs or IsrBs within 500 bp on the same strand were classified as standalone trans-acting ωRNAs. In some instances, ωRNAs and corresponding IscB/IsrBs were separated by the insertion of unrelated transposons between them. In such cases, the ωRNA was not considered a trans-acting ωRNA.

[0944] All covariance models were searched against our prokaryotic genome database. Examples with multiple ωRNAs on the same strand within 300 bp were retained for further analysis and categorized as ωRNA arrays.

### Identification of Eukaryotic IsrB Orthologs.

[0945] All eukaryotic genomes were downloaded from NCBI. In order to capture all possible IscBs, existing gene models were discarded for this analysis. All DNA sequences were translated into 6 frame amino acids translations and split into ORFs by splitting across stop codons (*).

[0946] Each ORF was then searched for IscB domains using the HMMER profiles generated by the IscB profile curation step. ORFs with hits to both IscB HNH and RuvC domains were retained for further analysis. The regions around the ORFs were then searched for IscB-linked ωRNAs using CMsearch and the IscB-linked ωRNA covariance models created in this study.

### Taxonomy Analysis of IscB, IsrB, and Cas9

[0947] Taxonomy information for available genomes were obtained from the NCBI microbial genomes portal. Genomes which lacked taxonomic information or metagenomes were discarded for this analysis. Genes were classified into IsrB, IscB, Cas9, or other on the basis of their cluster id. The fraction of genomes in each taxonomic group containing IsrB, IscB, or Cas9 was computed. For each gene type (IscB, IsrB, and Cas9) the distribution of the number of genes per genome in each taxonomic group was calculated. Box plots of gene counts per taxonomic group was then computed using Python.

### TnpB Curation and Analysis of ωRNA

[0948] Examples of IscB-linked ωRNA from K. racemifer were searched in the K. racemifer genome using BLASTn. Hits in the vicinity of IscB or IsrB were discarded. Multiple partial hits were found in the vicinity of TnpB, with the hit being always downstream of the TnpB gene.

[0949] Exploration of these hits showed that multiple TnpBs shared transposon ends with IscB. An upstream and downstream locus conservation analysis was performed for related TnpB loci as done for IscB. As TnpB is highly diverse, only TnpBs that were identifiable via high similarity in an mmseqs2 search were included. The RNA-seq traces were then used to identify the 5′ RNA boundary on the TnpB ωRNAs in the conservation analysis. These ωRNAs from the conservation analysis were then extracted and used to create an R-scape secondary structure with an E-value threshold of 1e-2 and a gap threshold of 0.75.

### Expression and Purification of CRISPR-Associated IscB RNPs

[0950] To purify the CRISPR-associated IscB in complex with the ncRNA of its native locus, the human codon optimized CRISPR-associated IscB protein was cloned into a modified pET45b (+) backbone with an N-terminal His14-MBP-bdSUMO tag (Frey, S. et al. (2014), J. Chromatogr. A. 1337, 95-105), and C-terminal twin-strep tag. The non-coding part of the CRISPR-associated IscB locus was cloned into a separate pCOLADuet-1 vector, and co-expressed with the CRISPR-associated IscB protein in Rosetta (DE3) pLysS strain (EMD Millipore) (Tables 5, 9). Cells were grown at 37° C. in the terrific broth (TB) medium supplemented with 100 μg/ml ampicillin, 25 μg/ml kanamycin, and 34 μg/ml chloramphenicol until reaching an optical density (OD600) of 0.3, then shifted to 18° C., and grown further until OD600 was 0.7. The bacterial culture was induced overnight at 18° C. with 0.2 mM isopropyl β-D-1thiogalactopyranoside (IPTG) and harvested by centrifugation. The cell paste was resuspended in lysis buffer (50 mM Tris pH 8, 200 mM NaCl, 5% glycerol, 5 mM MgCl₂, and 1 mM DTT) supplemented with protease inhibitors (PMSF and Roche complete, EDTA-free), and lysed by two passes with a high-pressure homogenizer (LM20 Microfluidizer, Microfluidics). The lysate was cleared by centrifugation, and the soluble fraction was gently mixed with Strep-Tactin Superflow Plus resin (Qiagen) at 4° C. The resin was first washed with lysis buffer, then briefly with buffer A (50 mM Tris pH 8, 1 M NaCl, 5% glycerol, 5 mM MgCl₂, and 1 mM DTT), and buffer B (50 mM Tris pH 8, 500 mM NaCl, 5% glycerol, 5 mM MgCl₂, and 1 mM DTT) on a gravity flow column. Bound RNP was then eluted in buffer B supplemented with 5 mM desthiobiotin (Sigma), and the N-terminal solubility tag was cleaved using bdSENP1 protease.

[0951] Once the boundaries of the co-purified RNA were defined by small RNA sequencing, the predicted ncRNA sequence was cloned downstream of a T7 promoter in a pCOLADuet-1 vector for inducible expression. The CRISPR-associated IscB-ncRNA complexes used for in vitro cleavage assays were then prepared following the same procedure explained above.

Small RNA Sequencing: Heterologous Expression in E. coli

[0952] Stb13 chemically competent E. coli were transformed with plasmids containing the locus of interest. A single colony was used to seed a 5 mL overnight culture. Following overnight growth, cultures were spun down, resuspended in 750 μL TRI reagent (Zymo) and incubated for 5 min at room temperature. 0.5 mm zirconia/silica beads (BioSpec Products) were added and the culture was vortexed for approximately 1 minute to mechanically lyse cells. 200 μL chloroform (Sigma Aldrich) was then added, culture was inverted gently to mix and incubated at room temperature for 3 min, followed by spinning at 12000×g at 4° C. for 15 min. The aqueous phase was used as input for RNA extraction using a Direct-zol RNA miniprep plus kit (Zymo). Extracted RNA was treated with 10 units of DNase I (NEB) for 30 min at 37° C. to remove residual DNA and purified again with an RNA Clean & Concentrator-25 kit (Zymo). Ribosomal RNA was removed using a RiboMinus Transcriptome Isolation Kit for bacteria (Thermo Fisher Scientific) as per the manufacturer's protocol using half-volume reactions. The purified sample was then treated with 20 units of T4 polynucleotide kinase (NEB) for 6 h at 37° C. and purified again with an RNA Clean & Concentrator-25 (Zymo) kit. The purified RNA was treated with 20 units of 5′ RNA polyphosphatase (Lucigen) for 30 min at 37° C. and purified again using an RNA Clean & Concentrator-5 kit (Zymo). Purified RNA was used as input to an NEBNext Small RNA Library Prep for Illumina (NEB) as per the manufacturer's protocol with an extension time of 60 s and 16 cycles in the final PCR. Amplified libraries were gel extracted, quantified by qPCR using a KAPA Library Quantification Kit for Illumina (Roche) on a StepOne Plus machine (Applied Biosystems/Thermo Fisher Scientific) and sequenced on an Illumina NextSeq with Read 1 42 cycles, Read 2 42 cycles and Index 1 6 cycles. Adapters were trimmed using CutAdapt (Martin, M. et al. (2011), EMBnet.journal. 17, 10-12) and mapped to loci of interest using Bowtie2 (Langmead, B. et al. (2012), Nat. Methods. 9, 357-359). Filled reads were obtained and filled reads longer than 200 bp were visualized using a custom Python script.

### Ribonucleoprotein

[0953] RNPs were purified as described. 100 μL concentrated RNP was used as input. The above protocol was followed with the following modifications: 300 μL TRI reagent (Zymo) and 60 μL chloroform (Sigma Aldrich) were used for RNA extraction.

K. racemifer

[0954] Freeze-dried K. racemifer SOSP1-21 DSM 44963 was obtained from DSMZ (www.dsmz.de/collection/catalogue/details/culture/DSM-44963), resuspended in GYM Streptomyces media (4 g glucose, 10 g malt extract, 4 g yeast extract in 1 L water) and grown in a shaking incubator at 28 C. After 76 days, the culture was spun down, and the above protocol was followed with the following modifications: mechanical lysis using zirconia beads was performed with approximately 30 min of vortexing. Ribosomal RNA was removed using a NEBNext rRNA Depletion Kit (Bacteria) (NEB) as per the manufacturer's protocol and the rRNA-depleted sample was purified using Agencourt RNAClean XP beads (Beckman Coulter) prior to T4 PNK treatment. T4 PNK treatment was performed for 1.5 h and purified with an RNA Clean & Concentrator-5 kit (Zymo). Final PCR in the small RNA library prep contained 15 cycles.

I. tetrasporus

[0955] An agar slant of I. tetrasporus UTEX B 2012 was obtained from UTEX, inoculated in Modified Bold 3N Medium (UTEX) and grown at 20° C. in a shaking incubator with 12-hour light/dark cycles. After 18 days, the culture was spun down and the above protocol was followed with the following modifications: ribosomal RNA was removed using the manufacturer's protocol from the RiboMinus Transcriptome Isolation Kit for bacteria (Thermo Fisher Scientific) with probes from the RiboMinus Transcriptome Isolation Kit for bacteria, RiboMinus Plant Kit for RNA-seq and RiboMinus Eukaryote Kit for RNA-seq (all Thermo Fisher Scientific) combined in an equimolar ratio. Eluted RNA from ribosomal removal was concentrated using an RNA Clean & Concentrator-25 kit (Zymo) prior to T4 PNK treatment. Final PCR of the small RNA library prep contained 15 cycles.

### Cloning PAM/TAM Libraries

[0956] Target sequences with 8N degenerate flanking sequences were synthesized by IDT and amplified by PCR with NEBNext High Fidelity 2×Master Mix (NEB). Backbone plasmid was digested with restriction enzymes (pACYC: EcoRV; pUC19: Eco88I and HindIII, Thermo Fisher Scientific) and treated with FastAP alkaline phosphatase (Thermo Fisher Scientific). The amplified library fragment was inserted into the backbone plasmid by Gibson assembly at 50° C. for 1 hour using 2×Gibson Assembly Master Mix (NEB) with an 8:1 molar ratio of insert: vector. The Gibson assembly reaction was then isopropanol precipitated by addition of an equal volume of isopropanol (Sigma Aldrich), final concentration of 50 mM NaCl, and 1 μL of GlycoBlue nucleic acid co-precipitant (Thermo Fisher Scientific). After a 15 min incubation at room temperature, the solution was spun down at max speed at 4° C. for 15 min, then the supernatant was pipetted off and the pelleted DNA was resuspended in 12 μL TE and incubated at 50° C. for 10 minutes to dissolve. 2 μL were then transformed by electroporation into Endura Electrocompetent E. coli (Lucigen) as per the manufacturer's instructions, recovered by shaking at 37° C. for 1 h, then plated across 5 22.7 cm×22.7 cm BioAssay plates with the appropriate antibiotic resistance. After 12-16 hours of growth at 37 C, cells were scraped from the plates and midi- or maxi-prepped using a NucleoBond Midi- or Maxi-prep kit (Machery Nagel).

E. coli PAM Screen

[0957] 100 ng each of a plasmid containing a locus of interest and a target 8N degenerate flanking library plasmid were transformed by electroporation into 30 μL Endura Electrocompetent E. coli (Lucigen) as per the manufacturer's protocol, with 3 biological replicates per locus of interest as well as 3 biological replicates of an empty control. After recovery by shaking at 37° C. for 1 hour, cells were plated across 1 22.7 cm×22.7 cm BioAssay plate with the appropriate antibiotic resistance and grown for 12-16 h at 37° C. Cells were scraped from the plate and mixed well, and 2 mL of the scraped cells were used as input to minipreps (Qiagen). 100 ng miniprepped plasmids were input to PCR to amplify the PAM-containing region with a 12-cycle PCR using NEBNext High Fidelity 2×PCR Master Mix (NEB) with an annealing temperature of 63° C., followed by a second 18-cycle round of PCR to further add Illumina adaptors and barcodes. Amplified libraries were gel extracted, quantified by a Qubit dsDNA HS assay (Thermo Fisher Scientific) and subject to single-end sequencing on an Illumina NextSeq with Read 1 75 cycles, Index 1 8 cycles and Index 2 8 cycles. PAMs were extracted and Weblogos depicting depleted PAMs were visualized using a custom Python script (Altae-Tran, H. et al. (2021).

### In Vitro Cleavage Assays

[0958] Double-stranded DNA (dsDNA) substrates were produced by PCR amplification of pUC19 plasmids containing the target sites and the TAM sequences. Cy3 and Cy5-conjugated DNA oligonucleotides (IDT) were used as primers to generate the labeled dsDNA substrates. Single-stranded DNA (ssDNA) substrates were ordered as Cy5.5-conjugated oligonucleotides (IDT). All ωRNA used in the biochemical assays was in vitro transcribed using the HiScribe T7 Quick High Yield RNA Synthesis kit (NEB) from the DNA templates purchased from Twist Biosciences. Target cleavage assays performed with AwalscB contained 10 nM of DNA substrate, 1 μM of protein, and 4 μM of ωRNA in a final 1×reaction buffer of 20 mM HEPES pH 7.5, 50 mM NaCl, and 5 mM MgCl₂. Assays were allowed to proceed at 37° C. for 1 hour, then briefly shifted to 50° C. for 5 min, and immediately placed on ice to help relax the RNA structure prior to RNA digestion. Reactions were then treated with RNase A (Qiagen), and Proteinase K (NEB), and purified using a PCR cleanup kit (Qiagen). DNA was resolved by gel electrophoresis on Novex 10% TBE (dsDNA substrates), 6% TBE-Urea (dsDNA substrates), and 15% TBE-Urea (ssDNA substrates) polyacrylamide gels (Thermo Fisher Scientific). Target cleavage assays performed with CRISPR-associated IscB RNPs were performed similarly, except that 450 nM RNP replaced the protein and the ωRNA, and the reactions were incubated for 1.5 hours at 37° C. Cleaned reactions were then run on a 4% agarose E-gel (Thermo Fisher Scientific). Target cleavage assays with AmaTnpB were performed with 1 μM of protein, 3 μM of ωRNA and 10 nM substrate, purified as described, and visualized on 2% agarose E-gels (dsDNA substrates) or 10% TBE-Urea polyacrylamide gels (ssDNA substrates).

[0959] For kinetic analysis of AwalscB or AmaTnpB activity, cleavage reactions were quenched with 11 mM of EDTA at each time point prior to cleanup. For screening metals, MgCl₂ was eliminated from the reaction buffer, while 2 mM of EDTA, and 7 mM of the indicated metal were added. Collateral cleavage assays for AwalscB were performed using 10 nM of unlabeled ds/ssDNA substrate along with 10 nM of Cy5.5-labeled collateral ssDNA substrate, and the reactions were allowed to proceed for 3 hours at 37° C. Cleavage of the labeled nontargeted ssDNA was then assessed on a 15% TBE-Urea polyacrylamide gel. Collateral cleavage assays for AmaTnpB were performed with 10 nM of unlabeled ds/ssDNA substrate and 10 nM of Cy5.5-labeled collateral ssDNA substrate for 1 hour at 60° C. and the resulting cleavage was visualized on a 10% TBE-Urea gel.

[0960] Single-stranded RNA (ssRNA) substrates were in vitro transcribed and labeled with pCp-Cy5 (Jena Bioscience) on their 3′ end. For the 3′ end labeling, 50 pmol of ssRNA was incubated with 100 pmol of pCp-Cy5 and 50 U of T4 RNA ligase 1 (NEB) in 50 mM Tris pH 7.8, 10 mM MgCl₂, 10 mM DTT, 2 mM ATP, and 10% DMSO at 4° C. for 40 hours. Labeling reactions were quenched with 20 mM EDTA and purified using an RNA Clean and Concentrator-25 kit (Zymo). ssRNA cleavage assays were performed similarly to the DNA cleavage assays, quenched with 19 mM EDTA at the end of the reactions, treated with Proteinase K, and visualized on a 6% TBE-Urea polyacrylamide gel.

[0961] For all experiments, all conditions were performed at least twice for replicability.

### Cell-Free Transcription Translation TAM Screen

[0962] IscB protein sequences were human codon optimized using the GenScript codon optimization tool, and IscB genes, TnpB genes with endogenous codon optimization, and ωRNA scaffolds were synthesized by Twist Biosciences. Transcription/translation templates were generated by PCR from custom synthesis products. Cell-free transcription/translation reactions were carried out using a PURExpress In Vitro Protein Synthesis Kit (NEB) as per the manufacturer's protocol with half-volume reactions, using 75 ng of template for the protein of interest, 125 ng of template for the corresponding ωRNA with a guide targeting the TAM library and 25 ng of TAM library plasmid. Reactions were incubated at 37° C. for 4 hours, then quenched by placing at 4° C. or on ice and adding 10 ug RNase A (Qiagen) and 8 units Proteinase K (NEB) each followed by a 5 min incubation at 37° C. DNA was extracted by PCR purification and adaptors were ligated using an NEBNext Ultra II DNA Library Prep Kit for Illumina (NEB) using the NEBNext Adaptor for Illumina (NEB) as per the manufacturer's protocol. Following adaptor ligation, cleaved products were amplified specifically using one primer specific to the TAM library backbone and one primer specific to the NEBNext adaptor with a 12-cycle PCR using NEBNext High Fidelity 2×PCR Master Mix (NEB) with an annealing temperature of 63° C., followed by a second 18-cycle round of PCR to further add the Illumina i5 adaptor. Amplified libraries were gel extracted, quantified by qPCR using a KAPA Library Quantification Kit for Illumina (Roche) on a StepOne Plus machine (Applied Biosystems/Thermo Fisher Scientific) and subject to single-end sequencing on an Illumina MiSeq with Read 1 80 cycles, Index 1 8 cycles and Index 2 8 cycles. TAMs were extracted and enrichment score for each TAM was calculated by filtering for all TAMs present more than once and normalizing to the TAM frequency in the input library subject to the same in vitro transcription/translation and quenching reactions. A position weight matrix based on the enrichment score was generated and Weblogos were visualized based on this position weight matrix using a custom Python script (Altae-Tran, H. et al. (2021).

### Cell-Free Transcription Translation Cleavage Assays

[0963] ωRNA templates were amplified from custom synthesis products as described and in vitro transcribed using a HiScribe T7 Quick High Yield RNA Synthesis Kit (NEB) with 150 ng DNA template in 2 μL, 2 μL T7 RNA Polymerase Mix (NEB) and 6.67 mM final concentration each NTP in 30 μL total volume reactions and purified with an RNA Clean & Concentrator-25 kit (Zymo). Protein sequences were amplified from custom synthesis products or locus plasmid templates. To generate targets, short oligos containing target and PAM sequences with appropriate overhangs were synthesized by Genewiz and cloned into corresponding backbone plasmids by Golden Gate or restriction-ligation cloning. Dye-conjugated primers for generating labeled linear targets with dyes as annotated were synthesized by IDT and linear targets were amplified from target plasmids by PCR using Q5 Hot Start High Fidelity 2×Master Mix (NEB) as per the manufacturer's protocol.

[0964] Cell-free transcription/translation reactions were carried out using a PURExpress In Vitro Protein Synthesis Kit (NEB) as per the manufacturer's protocol with half-volume reactions using 75 ng of template for the protein of interest and a final concentration of 1 μM in vitro-transcribed ωRNA to cap the possible final RNP concentration. Reactions were incubated at 37° C. for 4 hours to allow for RNP formation, then placed on ice to quench in vitro transcription/translation. 50-100 ng of target substrate was then added and the reactions were incubated at the specified temperature for 1 additional hour. Reactions were then quenched by adding 10 ug RNase A (Qiagen) and 8 units Proteinase K (NEB) each followed by a 5 min incubation at 37° C. DNA was extracted by PCR purification and run on either 10% or 6% Novex TBE-Urea gels, or 10% Novex TBE gels (Thermo Fisher Scientific) as per the manufacturer's protocols, as specified in figures. Gels were stained with 1×SYBR Gold (Thermo Fisher Scientific) where specified for 10-15 min and imaged on a ChemiDoc imager (BioRad) with optimal exposure settings. Each condition was performed twice for replicability.

### Mammalian Cell Culture and Transfection

[0965] Mammalian cell culture experiments were performed in the HEK293FT line (American Type Culture Collection (ATCC)) grown in Dulbecco's Modified Eagle Medium with high glucose, sodium pyruvate, and GlutaMAX (Thermo Fisher), additionally supplemented with 1× penicillin-streptomycin (Thermo Fisher), 10 mM HEPES (Thermo Fisher), and 10% fetal bovine serum (VWR Seradigm). All cells were maintained at confluency below 80%.

[0966] All transfections were performed with Lipofectamine 2000 (Thermo Fisher). Cells were plated 16-20 hours prior to transfection to ensure 90% confluency at the time of transfection. For 96-well plates, cells were plated at 20,000 cells/well, and for 24-well plates, cells were plated at 100,000 cells/well. For each well on the plate, transfection plasmids were combined with OptiMEM I Reduced Serum Medium (Thermo Fisher) to a total of 25 μL. Separately, 23 μL of OptiMEM was combined with 2 μL of Lipofectamine 2000. Plasmid and Lipofectamine solutions were then combined and pipetted onto cells.

### Mammalian Lysate Cleavage Assays

[0967] Human codon-optimized IscB genes were cloned into a CMV expression backbone by Gibson assembly using 2×Gibson Assembly Master Mix (NEB) to generate pCMV-SV40 NLS-IscB protein-nucleoplasmin NLS-3xHA constructs. 500 ng each protein expression plasmid was transfected in a separate well of a 24-well plate as described. After approximately 48 hours, cells were washed with 500 μL of Dulbecco's phosphate buffered saline (Sigma Aldrich). 50 μL ice-cold lysis buffer (20 mM HEPES 7.5, 100 mM KCl, 5 mM MgCl₂, 0.1% Triton-X 100, 5% glycerol, 1 mM DTT, 1×complete Protease Inhibitor Cocktail) was added, then cells were scraped from the plate, transferred to clean tubes and incubated on ice for 15 min. Cells were then sonicated in a cold water bath with amplitude 30 for 4 cycles of 10 s each. Lysate was then cleared by centrifugation at max speed for 20 min and supernatant was collected and either used fresh in assays or snap frozen in liquid nitrogen for later use. Labeled targets and in vitro-transcribed ωRNA was generated as described in “Cell-free transcription/translation cleavage assays” above.

[0968] To perform cleavage assays, 10 μL cell lysate was incubated with 1 μg in vitro-transcribed ωRNA or sgRNA, or no RNA for negative controls, and 100 ng target substrate in 1×NEBuffer 3.1 (NEB). Reactions were incubated at 37° C. for 1 hour, then quenched by adding 10 ug RNase A (Qiagen) and 8 units Proteinase K (NEB) each followed by a 5 min incubation at 37° C. DNA was extracted by PCR purification and run on a 4% Agarose E-gel EX (Thermo Fisher Scientific) as per the manufacturer's instructions and visualized on a ChemiDoc imager (BioRad).

### Sequencing of Cleavage Products

[0969] In vitro cleavage assays were performed as described. Purified reactions were subjected to a GLOE-seq library preparation protocol (Sriramachandran, A. et al. (2020), Mol. Cell. 78, 975-985.e7) as described using 2.5 μM adapter as input to the proximal adapter annealing step. The final amplification to add Illumina adapters and barcodes was performed with NEBNext High Fidelity 2×PCR Master Mix (NEB) with an annealing temperature of 63° C. for 15 s and 12 cycles. Libraries were subjected to paired-end sequencing using an Illumina MiSeq with Read 1 150 cycles, Read 2 150 cycles, Index 1 8 cycles and Index 2 8 cycles. Paired-end reads were mapped to the target substrate using BWA and 3′ ends were extracted and plotted using a custom Python script.

### Enzymatic Footprinting Assay

[0970] dsDNA substrate (191 bp) was produced by PCR amplification from a plasmid containing the target site and the TAM sequence. 10 pmol of dAwaIscB and 40 pmol of ωRNA were incubated in reaction buffer (20 mM HEPES pH 7.5, 50 mM NaCl, 10 mM MgCl₂, and 5% glycerol) at 37° C. for 30 min. Then, 0.1 pmol of DNA substrate was added and the reaction was allowed to proceed for another 30 min at 37° C. Next, 500 U of Exonuclease III (NEB) was added, the assay was incubated for an additional 10 min at 37° C. and quenched with 20 mM EDTA. As negative control, another reaction was run in parallel, in which ωRNA was excluded and the volume was replaced with water. After quenching, both reactions were briefly shifted to 50° C. for 5 min, then immediately placed on ice, treated with RNase A (Qiagen), and Proteinase K (NEB), and purified using a PCR cleanup kit (Qiagen). Purified reactions were subjected to a GLOE-seq library preparation protocol (Sriramachandran, A. et al. (2020), Mol. Cell. 78, 975-985.e7) as described using 2.5 μM adapter as input to both the proximal and distal adapter annealing steps. Libraries were amplified as described in the “Sequencing of cleavage products” section above and subjected to paired-end sequencing using an Illumina MiSeq with Read 1 100 cycles, Read 2 100 cycles, Index 1 8 cycles and Index 2 8 cycles. Paired-end reads were mapped to the target substrate using BWA and 3′ ends were extracted and plotted using a custom Python script (Altae-Tran, H. et al. (2021), Zenodo (2021).

### Mammalian Genome Editing

[0971] ωRNA scaffold backbones were cloned into a pUC19-based human U6 expression backbone by Gibson Assembly. For initial testing, 12-guide libraries were cloned in a pool mixing primers to add each of the 12 guides in in a given pool at equimolar ratios, and ωRNA scaffold backbones were subject to whole plasmid amplification with guide primers annealing to the U6 promoter and a second primer annealing to the start of the ωRNA scaffold using Phusion Flash High-Fidelity 2× Master Mix (Thermo Fisher Scientific). PCR products were gel extracted and eluted in 30 μL, then blunt-end ligated to circularize by addition of 5 units T4 PNK (NEB), 200 units T4 DNA Ligase (NEB) and final 1× T4 DNA Ligase Buffer (NEB) and incubation for 1.5 h at room temperature prior to transformation in Stb13 chemically competent E. coli (NEB). For individual guide constructs, oligos with appropriate overhangs were synthesized by Genewiz, annealed and phosphorylated using T4 PNK (NEB) and cloned into ωRNA backbones by restriction-ligation cloning. Protein expression constructs were cloned as described in “Mammalian lysate cleavage assays” above.

[0972] Prior to testing individual guides, each tested IscB protein was screened for activity in HEK293FT using a pool of 12 guides cloned as described. This was done to more rapidly assess many guides for a given protein for a broader survey of possible guides, as Applicants had no prior knowledge of the effect of guide properties such as sequence or genomic location may affect the ability of IscB to generate indels in eukaryotic cells. For this 12-guide pooled initial screening of IscB proteins, 800 ng protein expression construct and 1200 ng of the corresponding guide pool with corresponding ωRNA scaffold were transfected in one well of a 24-well plate as described. After 60-72 hours, genomic DNA was harvested by washing the cells once in 1×DPBS (Sigma Aldrich) and dry trypsinizing cells using TrypLE (Thermo Fisher Scientific). Trypsinized cells were collected in 1 mL 1×DPBS and pelleted by centrifugation at 300×g at 4° C. for 5 min. The supernatant was removed and cells were resuspended in 50 μL QuickExtract DNA Extraction Solution (Lucigen) and cycled at 65° C. for 15 min, 68° C. for 15 min then 95° C. for 10 min to lyse cells. 2.5 μL of lysed cells were used as input into each PCR reaction. Amplification of each region targeted by a guide in a given guide pool was performed individually. Insertion/deletion (indel) frequency was analyzed using CRISPResso2 (Clement, K. et al. (2019), Nat. Biotechnol. 37, 224-226). Given the low frequency of indel events with IscBs, in order to eliminate noise from PCR and sequencing error, only indels with at least 2 reads or more than 1 base inserted or deleted were counted towards reported indel frequencies. The allele frequency table generated by CRISPResso2 was used for manual verification of indels (i.e. both insertions and deletions occurring, occurrence of insertions and deletions of diverse sizes, not occurring in homonucleotide stretches), to determine if computed indels were due to PCR or sequencing error given that putative detected indels often occurred at frequencies similar to the detection threshold based on the number of cells input used in the experiment and the number of reads obtained from sequencing. Indel quantification results from the 12-guide pools are available in. Guides with manually verified indels from this pooled screen were assessed individually to validate indel formation as described below.

[0973] For individual guide sequences, 250 ng guide/ωRNA expression plasmid and 125 ng protein expression plasmid were transfected in each of 4 wells as biological replicates in a 96-well plate for each guide condition as described. After 60-72 hours, genomic DNA was harvested by washing the cells once in 1×DPBS (Sigma Aldrich) and adding 50 μL QuickExtract DNA Extraction Solution (Lucigen). Cells were scraped from the plates to suspend in QuickExtract and cycled at 65° C. for 15 min, 68° C. for 15 min then 95° C. for 10 min to lyse cells. 2.5 μL of lysed cells were used as input into each PCR reaction.

[0974] For library amplification, target genomic regions were amplified and with a 12-cycle PCR using NEBNext High Fidelity 2×PCR Master Mix (NEB) with an annealing temperature of 63° C. for 15 s, followed by a second 18-cycle round of PCR to add Illumina adapters and barcodes. The libraries were gel extracted and subject to single-end sequencing on an Illumina MiSeq with Read 1 300 cycles, Index 1 8 cycles, Index 2 8 cycles. Insertion/deletion (indel) frequency was analyzed using CRISPResso2 (Clement, K. et al. (2019), Nat. Biotechnol. 37, 224-226) as described. For individual guide/ωRNA experiments, to assess statistical significance, 2-tailed T-tests were performed using non-targeting guide/ωRNA conditions as a negative control (see Table 11).

### I. Tetrasporus Shotgun Sequencing

[0975] An agar slant of I. tetrasporus UTEX B 2012 was obtained from UTEX inoculated in Modified Bold 3N Medium (UTEX) and grown at 20° C. in a shaking incubator with 12 hour light/dark cycles. After 14 days, cultures were spun down and DNA was extracted using a DNeasy Plant Mini kit (Qiagen). Total DNA was tagmented using Tn5 and tagmentation reactions were quenched by addition of Buffer PB (Qiagen) and PCR purified. 10 μL purified DNA was used as input to PCR using 2×KOD HotStart Master Mix (Millipore Sigma) as per the manufacturer's instructions with an annealing temperature of 60° C. and 30 cycles to add Illumina adapters. Amplified libraries were gel extracted, quantified by qPCR using a KAPA Library Quantification Kit for Illumina (Roche) on a StepOne Plus machine (Applied Biosystems/Thermo Fisher Scientific) and subject to paired-end sequencing on an Illumina NextSeq with Read 1 150 cycles, Read 2 150 cycles, Index 1 8 cycles and Index 2 8 cycles. SPAdes-3.15.2 was used with the “isolate” option and kmer lengths of 21, 33, 55, 67 to create a contig level assembly from the reads (Bankevich, A. et al. (2012), J. Comput. Biol. 19, 455-477). BLASTn was then used to compare the final contigs containing ChlorIscB and IscB fragments with the published UTEX B 2012 chloroplast genome (GenBank accession KY407659.1) (Turmel, M. et al. (2017), Sci. Rep. 7, 994).

### Expression and Purification of TnpB Proteins

[0976] To purify the A. lobatus TnpB-2 protein in complex with the putative ωRNA of its native locus, an N-terminally His14-MBP tagged TnpB CDS and the corresponding downstream locus up to 80 bp beyond the end of predicted guide adaptor were cloned as a single piece downstream of a T7 promoter in a pET45b (+) vector. The AloTnpB-2 RNP was expressed and purified similarly to the CRISPR-associated IscB RNPs with the following modifications: (1) the lysis buffer, and the buffers A and B were supplemented with 40 mM imidazole, and 5 mM-mercaptoethanol, while MgCl₂ and DTT in all of the buffers were eliminated; (2) the RNP was purified on Ni-Sepharose 6 Fast Flow beads (GE Healthcare) instead of the Strep-Tactin resin; the elution buffer was supplemented with 300 mM imidazole and 5 mM β-mercaptoethanol, while MgCl₂, DTT and desthiobiotin were eliminated; (4) the His14-MBP solubility tag was kept attached to the RNP to provide stability.

[0977] To purify the A. macrosporangiidus TnpB, the native sequence was expressed from a pET45b (+) plasmid backbone, with a His14-MBP tag attached to its N-terminus via a TEV protease cleavage site. The AmaTnpB was expressed and purified similarly to AwalscB with the following modifications: (1) expression was performed in BL21 (DE3) cells (NEB) in the presence of 100 μg/ml ampicillin; (2) MgCl₂ was omitted from buffers C, D and E and the elution buffer; (3) TEV protease was added to the dialysis for solubility tag cleavage; (4) following dialysis, the protein was purified through a Resource S column against a gradient of 0.2-2M NaCl; (5) protein was concentrated up to 5 μM.

### Supplementary Text

### Extended Discussion of Hybrid CRISPR ωRNA and ωRNA Secondary Structure Analysis

[0978] Comparing the CRISPR-associated IscB ncRNA and ωRNA covariance model-based secondary structure predictions, Applicants found that all 10 base positions that were more than 97% conserved in the ωRNA were also highly conserved in the CRISPR-associated IscB ncRNA. Both the ωRNA and CRISPR-associated ncRNA contain a short 3-4 bp nexus, a conserved nexus hairpin, and a large region consisting of two interconnected multi-stem loops. The ωRNA additionally contains a hairpin that encompasses a Shine-Dalgarno (SD) sequence located approximately 10 bp upstream of the CDS start codon, implying that the ωRNA might be involved in the regulation of the translation of IscB. A statistically significant pseudoknot structure was predicted to exist in the ωRNA between the loop of one hairpin in the multi-stem loop region and the region directly downstream of the nexus, which Applicants termed the nexus pseudoknot hairpin. Examination of individual CRISPR-associated ncRNA sequences suggested the presence of a homologous pseudoknot structure. Scrambling the sequences found in the pseudoknot of the ncRNA disrupting the structure abolished the cleavage activity of the CRISPR-associated IscB. However, mutating the pseudoknot sequence while maintaining base pairing had no effect on cleavage activity, suggesting that the pseudoknot structure, but not necessarily sequence, was important for ncRNA function.

[0979] The majority of iscBs are associated with predicted ωRNA scaffolds matching the structure of the covariance model, but several large groups are not. To explore the diversity of the possible ωRNA scaffolds, Applicants iteratively built a set of profiles that span all major groups of ωRNAs associated with iscBs and isrBs, and found that different iscB/isrB clades were associated with structurally distinct ωRNAs (FIG. 9C). The structures differed by the number of hairpins in the multi-stem loop and guide adaptor regions, but the nexus pseudoknot was present in all major iscB- and isrB-associated ωRNAs. The IsrB ωRNAs additionally contained a second conserved pseudoknot between the guide adapter and a hairpin loop in the multi-stem loop region. Two of the three main IsrB ωRNA structures contained a third hairpin in the multi-stem loop region that forms the pseudoknot with the guide adaptor.

[0980] This guide adaptor pseudoknot was unique to IsrB ωRNAs and appears to have been lost contemporaneously with the insertion of the HNH domain (FIG. 15).

### Extended Phylogenetic Analysis and Discussion

[0981] To assess the robustness of our phylogenetic analyses and interpretations, Applicants describe in this section the additional analyses Applicants performed and the reasoning behind our phylogenetic conclusions.

[0982] To obtain maximally robust trees, Applicants used modified parameters for tree inference software. For all IQ-Tree 2 inferred trees, 5000 ultrafast bootstraps were performed with the bnni option to help reduce the impact of severe model violations on bootstrap support values (Hoang, D. et al. (2018), Mol. Biol. Evol. 35, 518-522).

[0983] Under this option, individual bootstrap trees are optimized using nearest neighbor exchange with hill-climbing on the likelihood function based on the bootstrap alignment. To improve the optimization performance of IQ-Tree 2 relative to default parameters, Applicants used nstop=500 (500 iterations of no improvement before terminating), with ninit=500 (500 initial trees), ntop=100 (100 top trees retained), and nbest=20 (20 best trees retained throughout the search and iteratively improved upon). For RAXML, Applicant sused 2000 rapid bootstraps for each tree to obtain accurate bootstrap values. For MrBayes, Applicants typically used 8-16 chains with a temperature difference between 0.01 and 0.025. Applicants also used 4-8 (resources permitting) independent runs to obtain a better estimate of convergence. Due to the occurrence of numerical overflow in MrBayes when computing likelihoods with a large number of taxa, Applicants employed a reaper script to restart from the last checkpoint when a numerical overflow was detected in any of the chains during the runs.

[0984] Applicants analyzed multiple different alignments to ensure robustness of the phylogenetic conclusions. Focusing the alignments only on the core, highly conserved regions containing the catalytic sites provided for comparison of IscB, IsrB, and Cas9s, proteins that widely differ in size and domain composition. Furthermore, analysis of slowly evolving regions enables phylogenetic inferences to be made over long evolutionary larger timescales that encompass the evolution of entire protein families, such as IscB and Cas9. The presence of multiple decaying, inactivated variants of IscB, IsrB, and Cas9 with high sequence divergence from active forms rendered long branch attraction a potential issue (Lockhart, P. et al. (1996), Proc. Natl. Acad. Sci. U.S.A 93, 1930-1934). Therefore, all inactivated proteins were removed from the RuvC/BH and RuvC/BH/HNH alignments to ensure the phylogeny tracked the evolution of active nucleases with the maximum possible accuracy, avoiding the artifacts caused by mixing active and inactive nucleases that evolve with substantially different rates. The evolution of Cas9 from IscB through the intermediate CRISPR-associated IscB cluster 2089 was supported by all inferred trees, and the evolution of IscB from IsrB is also strongly supported. However, to ensure robustness of these interpretations, Applicants considered numerous phylogenetic parameters, compared Bayesian and maximum likelihood methods, and also assessed the effect of taxa sampling (FIGS. 10C-D, 20, 21A-B).

[0985] Next, Applicants tested whether the main assumptions of phylogenetic inference held for the alignments used for our phylogenetic analyses. In some cases, the stationarity condition did not hold for the default alignment, prompting additional modifications to reduce the extent of stationarity violation. The stationarity violations detected for RuvC/BH/HNH alignments were mostly resolved by removing Cas9s of subtype II-B (prompted by the unstable placement of the major II-B Cas9 clade in the phylogenetic trees) and were completely eliminated by removing all Cas9s except for the earliest forms that evolved from IscB. This improvement in the tree quality suggests different evolutionary regimes for the core regions of IscB/IsrB (the RuvC, BH, and HNH domains) are substantially different in IscB/IsrBs and the homologous regions of the late, specialized Cas9s (II-B, II-C, tnpA-associated II-C, and the majority of II-A). Such a difference in evolutionary pressures is likely to stem from the shift in biological functionality between 22 systems (IscB/IsrB) and CRISPR-Cas systems (Cas9). Applicants performed additional phylogenetic analyses using these two modified alignments in order to assess the consistency of the inferences. The origin of Cas9 from the IscB cluster 2089 was consistently reproduced in these analyses (FIGS. 10, 21A,C).

[0986] Due to the removal of clusters that included inactivated nucleases, some CRISPR-associated IscBs were removed. For experimental characterization, Applicants considered all CRISPR-associated clusters regardless of whether or not they were included in the main phylogenetic analyses. In particular, IscB cluster 34507 contained mostly inactivated variants. Applicants studied IscBs from this cluster experimentally, reasoning that the high level of inactivation implies that the active members of this cluster are likely to have a high level of activity that could render them toxic to the host cell resulting in selection driving inactivation. To determine the likely position of this cluster in the full phylogenetic tree, Applicants performed an additional phylogenetic analysis of full IscB proteins (excluding the C-termini that aligned poorly). Applicants found that the experimentally studied CRISPR associated IscBs belonged to a small clade of CRISPR-associated IscBs that includes 4 non-redundant, CRISPR-associated loci. This analysis also yielded additional information on the relationship between IscB and Cas9. Because the alignment used for this analysis consisted of all IscBs and Cas9 1261 and Cas9_665 (two previously identified early Cas9 clusters from II-D), Applicants were able to construct a MAFFT-einsi alignment that spanned the entire length of these proteins (except for the C-terminal and the PLMP domain that is missing in Cas9). The phylogenetic analysis based on this alignment incorporated information from all homologous regions of IscB and Cas9 rather than the core region only. Clusters lacking coverage to any of the catalytic domains were removed; however, clusters including inactive nucleases were retained in the analysis. Positions in the alignment with more than 75% gaps were removed, and the tree was inferred using IQ-Tree 2 with the modified parameters described above. The exclusion of additional Cas9s in this analysis could potentially skew the placement of the Cas9 family. Nevertheless, the resulting tree supported CRISPR-associated IscB cluster 2089 as the ancestor of Cas9.

[0987] Phylogenetic symmetry tests showed that the main RuvC/BH/HNH alignment that included all Cas9s and IscBs likely violated the stationarity condition used by most phylogenetic methods (SRH conditions). Similarly, phylogenetic symmetry tests show that the high resolution (individual proteins as opposed to cluster representatives) codon DNA sequence alignment of early cas9s also likely violates the stationarity condition. Applicants considered a number of methods to assess the validity of the phylogenetic trees inferred using these alignments. For the early Cas9 tree, Applicants compared the tree inferred from the amino acid sequence (IQ-Tree 2, WAG+F+I+G4 model) to the tree inferred from the underlying DNA codon sequences (GTR+G4). The two trees were closely congruent with respect to the transition from IscB to Cas9 although despite the DNA tree inference only involved the simple GTR substitution model that does not take codon level information into account.

[0988] To assess the generalizability of the phylogenetic conclusions, in addition to bootstrap analyses in all ML trees, Applicants also performed a sensitivity analysis of the RuvC/BH/HNH phylogenetic inferences. Specifically, Applicants considered the effect of random exclusion of taxa. To this end, Applicants explored a range of taxa dropout rates. For each dropout rate, r, Applicants selected 1000/(1-r) alignments with r taxa randomly dropped out. Because Applicants were interested predominantly in the topology surrounding early Cas9 evolution, Applicants ensured that IscB cluster 2089 (putative Cas9 modern ancestor) and early Cas9 clusters (Cas9_1261, Cas9_665, Cas9_1079, Cas9_849) were retained in every alignment. Applicants then obtained inference for each of these taxon subsampled alignments. All trees were rooted on the clade of IscBs considered to be ancestral, that is evolved from IsrB, as inferred from the RuvC/BH tree. Next, various features (such as percentage of trees where Cas9 is monophyletic) were summarized across all trees for each dropout rate (FIG. 10). Error bars (95% confidence intervals) for the estimates were computed using 2000 bootstraps over the tree samples. Due to the computationally intense nature of ML inference for alignments with many taxa, Applicants limited this dropout analysis to FastTree2 (as opposed to IQ-Tree 2) based phylogenetic inference. The results of this analysis supported that Cas9_1261, Cas9_665 were the oldest Cas9 groups, and that all Cas9s likely originated from the ancestors of these two clusters. Moreover, the tree supported that even with taxon dropout rates of up to 50%, most of the resulting trees supported the CRISPR-associated IscB cluster 2089 as the ancestor to all extant Cas9s.

[0989] Applicants next considered whether or not the coarse graining of proteins (specifically the use of cluster representatives), as opposed to including all non-redundant sequences (at 90% redundancy), affected the phylogenetic inference. Applicants curated two “high resolution” alignments consisting of all non-redundant proteins of interest (Cas9/IscB) from clusters related to the early evolution of Cas9. One version of this alignment consisted of full protein alignments (using MAFFT-einsi) with the REC domains and PLMP domains removed. Positions with 75% or more gaps were removed. Another alignment consisted of translation aligned DNA codons for the ORFs, again removing REC domains and PLMP domains. Highly gapped codons triplet positions (sets of 3 positions) were removed using BMGE (Criscuolo, A. et al. (2010), BMC Evol. Biol. 10, 210). The resulting alignments were analyzed using IQ-Tree 2 and MrBayes. As the DNA alignment suffered from severe violation of the stationarity requirement for phylogenetic analysis, Applicants considered further using heterotachy models to account for changing modes of evolution throughout the underlying evolutionary tree. Adding a heterotachy-aware model did not change the inferred sequence of events in the evolution of early Cas9 from IscB. Phylogenetic analyses of the DNA sequences were agnostic to codons. Nevertheless, the two sets of alignments produced closely similar topologies for early events in Cas9 evolution. These topologies further agreed with previously identified topologies inferred using coarse grained clusters, suggesting that clustering was not detrimental to the inference of phylogenies.

[0990] Comparison of IscB/IsrB ωRNA phylogeny to the protein phylogenies can be useful for identifying co-evolution, and potentially could provide more information regarding the ancestry of Cas9. However, the structural motifs differed across the diversity of ωRNAs. Therefore, the main large-scale phylogenetic analysis across IscB/IsrB ωRNAs used a non-structured nucleotide alignment of representative ωRNAs that was produced using MAFFT-ginsi. Because the nexus pseudoknot is conserved in almost all ωRNAs, greater emphasis was given to this region by removing all sequences with low coverage to the nexus pseudoknot. An IQ-Tree 2 ML inference showed that IscB ωRNAs are a deep branch in the tree of ωRNAs, suggesting that IscB ωRNAs evolved on a single occasion from IsrB ωRNAs. Due to the high diversity of ωRNAs, the early Cas9_1261 and Cas9_665 tracrRNAs could not be included in the analysis for accurate placement because as the alignment across all RNAs failed to capture sufficient global sequence conservation. CMsearch of two tracrRNAs from early Cas9s (Cas9_1261 and Cas9_665) yielded significant hits to the G1a ωRNA profile (E-values 3.7e-8, 4. 1e-8 respectively), suggesting that at least part of the tracrRNA in early Cas9 systems originated from the IscB ωRNA (FIG. 11). The likely evolutionary link between ωRNAs and tracrRNAs further suggests that Cas9 evolved from IscB. To further address the question of whether or not early Cas9 tracrRNAs were derived from ωRNAs, Applicants constructed an accurate MAFFT-ginsi alignment of the early Cas9 tracrRNAs along with 25 closely related IscB ωRNAs, including the hybrid CRISPR/ωRNA from IscB cluster 2089. To account for the discrepancy between tracrRNAs and ωRNAs, Applicants concatenated the DR of the corresponding CRISPRs to the tracrRNA with a 4 bp poly-A tetraloop joining the two. Applicants performed a Bayesian phylogenetic analysis to address potential issues with the smaller number of taxa in this analysis. Applicants found that the combined DR/tracrRNAs likely evolved from IscB (2089) like ωRNAs, with high posterior probability (branch posterior 89%±1%). This result further suggests that all Cas9s evolved from the CRISPR-associated IscB cluster 2089.

[0991] Additional evidence from protein or RNA alignment comparisons were also useful in identifying the most likely ancestor of Cas9. On the sequence level, the Cas9_1261 and Cas9_665 representative sequences are more similar to the IscB cluster 2089 representative sequence in the split RuvC and HNH domains compared to other example IscBs. Moreover, the N-terminus of Cas9_1261 potentially contains fragments of the PLMP domain that is characteristic of IscB, suggesting that the PLMP domain gradually degraded during the transition to Cas9. Lastly, the 5′ end of the DRs from CRISPR-associated IscB cluster 2089 is closely similar to the 5′-terminal sequences of the DRs from Cas9_1261 and Cas9_665, suggesting further homology. All of these observations, in addition to the phylogenetic analyses, strongly suggest that CRISPR-associated IscB cluster 2089 is the ancestor of the earliest Cas9s. Accordingly, the sequence of events in the evolution of Cas9 was, first, the association of CRISPR arrays with IscB, either through duplication of the 5′ of the ωRNA or by insertion of the ωRNA into a CRISPR array. Then, REC-like sequences were inserted between the BH and RuvC-II, or possibly inside the BH, splitting it into two domains, the second of which remains in some early Cas9s. Then, the PLMP domain degraded from the lengthened IscB protein becoming Cas9, which subsequently became associated with the CRISPR adaptation module. Given the rarity of the early Cas9s, such as Subtype II-D, compared to IscB and other Cas9 subtypes, it appears likely that these systems containing small, simply organized Cas9s were outcompeted by the subsequently evolved, more efficient, larger Cas9s. From our phylogenetic analyses, the most likely candidate set of adaptation genes that became associated with Cas9 at first included Cas1, Cas2, and Cas4 genes. The association with Cas4 was then likely lost, forming Type II-C Cas9s, which subsequently gained additional associations to become II-A (associated with Csn2), II-B (re-association with Cas4), and tnpA-associated II-C(re-associated with Y1 recombinases).

### Extended Discussion of Potential Biological Functions of IS200 605 Endonucleases.

[0992] The biological functions of 2 systems remain unknown, but several hypotheses appear to be compatible with available evidence.

[0993] First, IscB, IsrB, and TnpB could mediate RNA-guided TnpA-catalyzed transposition while suppressing transposition independent of ωRNA. Our phylogenomic analysis together with previous observations (Kapitonov, V. et al. (2015), J. Bacteriol. 198, 797-807) indicate that iscB, isrB, and a subfamily of cas9 have all associated with the Y1 transposase tnpA of IS200/IS605 transposons on multiple, independent occasions (FIG. 9A) (Kapitonov, V. et al. (2015), J. Bacteriol. 198, 797-807). Moreover, the iscB, isrB and tnpB genes themselves are embedded in non-autonomous transposons of the IS200/IS605 superfamily. Integration events of ωRNA-containing transposons have been observed in locations with an ATGA or GTGA 3′ flanking sequences (Weinberg, Z. (2009), Nature 462, 656-659), which is a common TAM sequence for IscB proteins (FIG. 48). Many IscB TAMs contain start and stop codons, such that IscB targeting could mediate transposon insertion at the beginning or end of operons, allowing the transposon to exploit existing transcription initiation and termination signals. Together, these observations suggest the possibility that IscB, IsrB and TnpB are functionally analogous to CRISPR-associated transposases (CAST complexes) (Strecker, J. et al. (2019), Science 365, 48-53; Klompe, S. et al. (2019), Nature 571, 219-225), which mediate RNA-guided transposition of Tn7-like transposons. However, in contrast to CAST effectors such as Cas12k, an inactivated TnpB derivative (Strecker, J. et al. (2019), Science 365, 48-53), the great majority of IscB, IsrB and TnpB are predicted to be active nucleases. The role of the nuclease activity of these proteins in RNA-guided transposition (if any) remains to be studied experimentally. One possibility is that these nucleases eliminate aberrant DNA structures emerging upon RNA-guided transposon insertion.

[0994] An orthogonal hypothesis is that these nucleases, together with the ωRNA, are a distinct variety of toxins, to which TnpA is the antitoxin. Such toxins would kill cells lacking the inserted IS200/605 locus, thus making the host addicted to the IS200/605 transposase and ensuring that the non-autonomous transposons encoding IscB/TnpB also maintain their transposition capacity.

[0995] In addition to its direct role in transposition, TnpA might function to acquire guides for 22 systems, analogously to the Cas1 protein that is thought to have evolved from the transposase of the casposons, a distinct class of self-synthesizing transposons (Krupovic, M. et al. (2014), BMC Biol. 12, 1-12). The high sequence identity between the ωRNA transposon end-overlapping regions in both iscB and mpB loci in K. racemifer suggests that, at least in this bacterium, some IscBs and TnpBs share a mechanism for acquiring guide sequences. More generally, loci encoding complete 22 systems or standalone ωRNAs could be mobilized and moved to new locations by TnpA, thereby associating with new, diverse flanking sequences that become guides.

### References for Extended Discussion of Supplemental Materials

[0996] 1. F. Zhang, Development of CRISPR-Cas systems for genome editing and beyond. Quarterly Reviews of Biophysics. 52 (2019).
[0997] 2. F. Hille, H. Richter, S. P. Wong, M. Bratovič, S. Ressel, E. Charpentier, The biology of CRISPR-Cas: Backward and forward. Cell. 172, 1239-1259 (2018).
[0998] 3. V. V. Kapitonov, K. S. Makarova, E. V. Koonin, ISC, a novel group of bacterial and Archaeal DNA transposons that encode Cas9 homologs. J. Bacteriol. 198, 797-807 (2015).
[0999] 4. P. Siguier, E. Gourbeyre, M. Chandler, Bacterial insertion sequences: their genomic impact and diversity. FEMS Microbiol. Rev. 38, 865-891 (2014).
[1000] 5. S. Shmakov, A. Smargon, D. Scott, D. Cox, N. Pyzocha, W. Yan, O. O. Abudayyeh, J. S. Gootenberg, K. S. Makarova, Y. I. Wolf, K. Severinov, F. Zhang, E. V. Koonin, Diversity and evolution of class 2 CRISPR-Cas systems. Nat. Rev. Microbiol. 15, 169-182 (2017).
[1001] 6. B. Zetsche, J. S. Gootenberg, O. O. Abudayyeh, I. M. Slaymaker, K. S. Makarova, P. Essletzbichler, S. E. Volz, J. Joung, J. van der Oost, A. Regev, E. V. Koonin, F. Zhang, Cpf1 is a single RNA-guided endonuclease of a class 2 CRISPR-Cas system. Cell. 163, 759-771 (2015).
[1002] 7. E. Deltcheva, K. Chylinski, C. M. Sharma, K. Gonzales, Y. Chao, Z. A. Pirzada, M. R. Eckert, J. Vogel, E. Charpentier, CRISPR RNA maturation by trans-encoded small RNA and host factor RNase III. Nature. 471, 602-607 (2011).
[1003] 8. I. Kalvari, E. P. Nawrocki, N. Ontiveros-Palacios, J. Argasinska, K. Lamkiewicz, M. Marz, S. Griffiths-Jones, C. Toffano-Nioche, D. Gautheret, Z. Weinberg, E. Rivas, S. R. Eddy, R. D. Finn, A. Bateman, A. I. Petrov, Rfam 14: expanded coverage of metagenomic, viral and microRNA families. Nucleic Acids Res. 49, D192-D200 (2021).
[1004] 9. Z. Weinberg, J. Perreault, M. M. Meyer, R. R. Breaker, Exceptional structured noncoding RNAs revealed by bacterial metagenome analysis. Nature. 462, 656-659 (2009).
[1005] 10. M. Jinek, K. Chylinski, I. Fonfara, M. Hauer, J. A. Doudna, E. Charpentier, A programmable dual-RNA-guided DNA endonuclease in adaptive bacterial immunity. Science. 337, 816-821 (2012).
[1006] 11. G. Gasiunas, R. Barrangou, P. Horvath, V. Siksnys, Cas9-crRNA ribonucleoprotein complex mediates specific DNA cleavage for adaptive immunity in bacteria. Proc. Natl. Acad. Sci. U.S.A 109, E2579-86 (2012).
[1007] 12. G. Gasiunas, J. K. Young, T. Karvelis, D. Kazlauskas, T. Urbaitis, M. Jasnauskaite, M. M. Grusyte, S. Paulraj, P.-H. Wang, Z. Hou, S. K. Dooley, M. Cigan, C. Alarcon, N. D. Chilcoat, G. Bigelyte, J. L. Curcuru, M. Mabuchi, Z. Sun, R. T. Fuchs, E. Schildkraut, P. R. Weigele, W. E. Jack, G. B. Robb, Č. Venclovas, V. Siksnys, A catalogue of biochemically diverse CRISPR-Cas9 orthologs. Nat. Commun. 11, 5512 (2020).
[1008] 13. M. Jinek, F. Jiang, D. W. Taylor, S. H. Sternberg, E. Kaya, E. Ma, C. Anders, M. Hauer, K. Zhou, S. Lin, M. Kaplan, A. T. Iavarone, E. Charpentier, E. Nogales, J. A. Doudna, Structures of Cas9 endonucleases reveal RNA-mediated conformational activation. Science. 343, 1247997 (2014).
[1009] 14. B. Q. Minh, H. A. Schmidt, O. Chernomor, D. Schrempf, M. D. Woodhams, A. von Haeseler, R. Lanfear, IQ-TREE 2: New Models and Efficient Methods for Phylogenetic Inference in the Genomic Era. Mol. Biol. Evol. 37, 1530-1534 (2020).
[1010] 15. K. S. Makarova, Y. I. Wolf, J. Iranzo, S. A. Shmakov, O. S. Alkhnbashi, S. J. J. Brouns, E. Charpentier, D. Cheng, D. H. Haft, P. Horvath, S. Moineau, F. J. M. Mojica, D. Scott, S. A. Shah, V. Siksnys, M. P. Terns, C. Venclovas, M. F. White, A. F. Yakunin, W. Yan, F. Zhang, R. A. Garrett, R. Backofen, J. van der Oost, R. Barrangou, E. V. Koonin, Evolutionary classification of CRISPR-Cas systems: a burst of class 2 and derived variants. Nat. Rev. Microbiol. 18, 67-83 (2020).
[1011] 16. K. A. Majorek, S. Dunin-Horkawicz, K. Steczkiewicz, A. Muszewska, M. Nowotny, K. Ginalski, J. M. Bujnicki, The RNase H-like superfamily: new members, comparative structural analysis and evolutionary classification. Nucleic Acids Res. 42, 4160-4179 (2014).
[1012] 17. H. Nishimasu, F. A. Ran, P. D. Hsu, S. Konermann, S. I. Shehata, N. Dohmae, R. Ishitani, F. Zhang, O. Nureki, Crystal structure of Cas9 in complex with guide RNA and target DNA. Cell. 156, 935-949 (2014).
[1013] 18. W. Bao, J. Jurka, Homologues of bacterial TnpB_IS605 are widespread in diverse eukaryotic transposable elements. Mob. DNA. 4, 12 (2013).
[1014] 19. J. V. Gomes-Filho, L. S. Zaramela, V. C. da S. Italiani, N. S. Baliga, R. Z. N. Vêncio, T. Koide, Sense overlapping transcripts in IS1341-type transposase genes are functional non-coding RNAs in archaea. RNA Biol. 12, 490-500 (2015).
[1015] 20. Z. Weinberg, C. E. Lunse, K. A. Corbino, T. D. Ames, J. W. Nelson, A. Roth, K. R. Perkins, M. E. Sherlock, R. R. Breaker, Detection of 224 candidate structured RNAs by comparative analysis of specific subsets of intergenic regions. Nucleic Acids Res. 45, 10811-10823 (2017).
[1016] 21. A. Hüttenhofer, P. Schattner, The principles of guiding by RNA: chimeric RNA-protein enzymes. Nat. Rev. Genet. 7, 475-482 (2006).
[1017] 22. A. Schneider, A short history of guide RNAs: The intricate path that led to the discovery of a basic biological concept. EMBO Rep. 21, e51918 (2020).
[1018] 23. E. V. Koonin, Evolution of RNA- and DNA-guided antivirus defense systems in prokaryotes and eukaryotes: common ancestry vs convergence. Biol. Direct. 12 (2017).
[1019] 24. H. Altae-Tran, S. Kannan, F. Zhang, Code and processed data for: The widespread IS200/605 transposon family encodes diverse programmable RNA-guided endonucleases, Version 1.0, Zenodo (2021); <link to be inserted after official acceptance of manuscript>.
[1020] 25. C. Camacho, G. Coulouris, V. Avagyan, N. Ma, J. Papadopoulos, K. Bealer, T. L. Madden, BLAST+: architecture and applications. BMC Bioinformatics. 10, 421 (2009).
[1021] 26. K. Katoh, D. M. Standley, MAFFT multiple sequence alignment software version 7: improvements in performance and usability. Mol. Biol. Evol. 30, 772-780 (2013).
[1022] 27. M. Steinegger, J. Söding, MMseqs2 enables sensitive protein sequence searching for the analysis of massive data sets. Nat. Biotechnol. 35, 1026-1028 (2017).
[1023] 28. M. Steinegger, M. Meier, M. Mirdita, H. Vöhringer, S. J. Haunsberger, J. Söding, HH-suite3 for fast remote homology detection and deep protein annotation. BMC Bioinformatics. 20, 473 (2019).
[1024] 29. S. R. Eddy, Accelerated Profile HMM Searches. PLoS Comput. Biol. 7, e1002195 (2011).
[1025] 30. S. A. Shmakov, K. S. Makarova, Y. I. Wolf, K. V. Severinov, E. V. Koonin, Systematic prediction of genes functionally linked to CRISPR-Cas systems by gene neighborhood analysis. Proc. Natl. Acad. Sci. U.S.A 115, E5307-E5316 (2018).
[1026] 31. A. B. Crawley, J. R. Henriksen, R. Barrangou, CRISPRdisco: An Automated Pipeline for the Discovery and Analysis of CRISPR-Cas Systems. CRISPR J. 1, 171-181 (2018).
[1027] 32. D. H. Haft, B. J. Loftus, D. L. Richardson, F. Yang, J. A. Eisen, I. T. Paulsen, O. White, TIGRFAMs: a protein family resource for the functional identification of proteins. Nucleic Acids Res. 29, 41-43 (2001).
[1028] 33. A. Delcher, Improved microbial gene identification with GLIMMER. Nucleic Acids Research. 27 (1999), pp. 4636-4641.
[1029] 34. S. Naser-Khdour, B. Q. Minh, W. Zhang, E. A. Stone, R. Lanfear, The Prevalence and Impact of Model Violations in Phylogenetic Analysis. Genome Biol. Evol. 11, 3341-3352 (2019).
[1030] 35. S. Kalyaanamoorthy, B. Q. Minh, T. K. F. Wong, A. von Haeseler, L. S. Jermiin, ModelFinder: fast model selection for accurate phylogenetic estimates. Nat. Methods. 14, 587-589 (2017).
[1031] 36. M. N. Price, P. S. Dehal, A. P. Arkin, FastTree 2--approximately maximum-likelihood trees for large alignments. PLOS One. 5, e9490 (2010).
[1032] 37. G. Altekar, S. Dwarkadas, J. P. Huelsenbeck, F. Ronquist, Parallel Metropolis coupled Markov chain Monte Carlo for Bayesian phylogenetic inference. Bioinformatics. 20, 407-415 (2004).
[1033] 38. A. Stamatakis, RAXML version 8: a tool for phylogenetic analysis and post-analysis of large phylogenies. Bioinformatics. 30, 1312-1313 (2014).
[1034] 39. R. Lorenz, S. H. Bernhart, C. H. zu Siederdissen, H. Tafer, C. Flamm, P. F. Stadler, I. L. Hofacker, ViennaRNA Package 2.0. Algorithms Mol. Biol. 6, 1-14 (2011).
[1035] 40. E. Rivas, J. Clements, S. R. Eddy, A statistical test for conserved RNA structure shows lack of evidence for structure in lncRNAs. Nat. Methods. 14, 45-48 (2017).
[1036] 41. E. P. Nawrocki, S. R. Eddy, Infernal 1.1:100-fold faster RNA homology searches. Bioinformatics. 29, 2933-2935 (2013).
[1037] 42. Z. Weinberg, R. R. Breaker, R2R—software to speed the depiction of aesthetic consensus RNA secondary structures. BMC Bioinformatics. 12, 3 (2011).
[1038] 43. J. Mistry, S. Chuguransky, L. Williams, M. Qureshi, G. A. Salazar, E. L. L. Sonnhammer, S. C. E. Tosatto, L. Paladin, S. Raj, L. J. Richardson, R. D. Finn, A. Bateman, Pfam: The protein families database in 2021. Nucleic Acids Res. 49, D412-D419 (2021).
[1039] 44. C. Bland, T. L. Ramsey, F. Sabree, M. Lowe, K. Brown, N. C. Kyrpides, P. Hugenholtz, CRISPR recognition tool (CRT): a tool for automatic detection of clustered regularly interspaced palindromic repeats. BMC Bioinformatics. 8, 209 (2007).
[1040] 45. F. Asnicar, G. Weingart, T. L. Tickle, C. Huttenhower, N. Segata, Compact graphical representation of phylogenetic data and metadata with GraPhlAn. Peer J. 3, e1029 (2015).
[1041] 46. L. Maaten, G. Hinton, Visualizing Data using t-SNE. Journal of machine learning research. 9, 2579-2605 (2008).
[1042] 47. P. G. Poličar, M. Stražar, B. Zupan, Embedding to reference t-SNE space addresses batch effects in single-cell classification. bioRxiv (2019), doi: 10.1101/671404.
[1043] 48. P. J. Rousseeuw, Silhouettes: A graphical aid to the interpretation and validation of cluster analysis. J. Comput. Appl. Math. 20, 53-65 (1987).
[1044] 49. R. J. G. B. Campello, D. Moulavi, J. Sander, in Advances in Knowledge Discovery and Data Mining (Springer Berlin Heidelberg, Berlin, Heidelberg, 2013), Lecture notes in computer science, pp. 160-172.
[1045] 50. D. H. Parks, M. Imelfort, C. T. Skennerton, P. Hugenholtz, G. W. Tyson, CheckM: assessing the quality of microbial genomes recovered from isolates, single cells, and metagenomes. Genome Res. 25, 1043-1055 (2015).
[1046] 51. P.-A. Chaumeil, A. J. Mussig, P. Hugenholtz, D. H. Parks, GTDB-Tk: a toolkit to classify genomes with the Genome Taxonomy Database. Bioinformatics (2019), doi: 10.1093/bioinformatics/btz848.
[1047] 52. S. Frey, D. Görlich, A new set of highly efficient, tag-cleaving proteases for purifying recombinant proteins. J. Chromatogr. A. 1337, 95-105 (2014).
[1048] 53. M. Martin, Cutadapt removes adapter sequences from high-throughput sequencing reads. EMBnet.journal. 17, 10-12 (2011).
[1049] 54. B. Langmead, S. L. Salzberg, Fast gapped-read alignment with Bowtie 2. Nat. Methods. 9, 357-359 (2012).
[1050] 55. A. M. Sriramachandran, G. Petrosino, M. Méndez-Lago, A. J. Schäfer, L. S. Batista-Nascimento, N. Zilio, H. D. Ulrich, Genome-wide Nucleotide-Resolution Mapping of DNA Replication Patterns, Single-Strand Breaks, and Lesions by GLOE-Seq. Mol. Cell. 78, 975-985.e7 (2020).
[1051] 56. K. Clement, H. Rees, M. C. Canver, J. M. Gehrke, R. Farouni, J. Y. Hsu, M. A. Cole, D. R. Liu, J. K. Joung, D. E. Bauer, L. Pinello, CRISPResso2 provides accurate and rapid genome editing sequence analysis. Nat. Biotechnol. 37, 224-226 (2019).
[1052] 57. A. Bankevich, S. Nurk, D. Antipov, A. A. Gurevich, M. Dvorkin, A. S. Kulikov, V. M. Lesin, S. I. Nikolenko, S. Pham, A. D. Prjibelski, A. V. Pyshkin, A. V. Sirotkin, N. Vyahhi, G. Tesler, M. A. Alekseyev, P. A. Pevzner, SPAdes: a new genome assembly algorithm and its applications to single-cell sequencing. J. Comput. Biol. 19, 455-477 (2012).
[1053] 58. M. Turmel, C. Otis, C. Lemieux, Divergent copies of the large inverted repeat in the chloroplast genomes of ulvophycean green algae. Sci. Rep. 7, 994 (2017).
[1054] 59. D. T. Hoang, O. Chernomor, A. von Haeseler, B. Q. Minh, L. S. Vinh, UFBoot2: Improving the Ultrafast Bootstrap Approximation. Mol. Biol. Evol. 35, 518-522 (2018).
[1055] 60. P. J. Lockhart, A. W. Larkum, M. Steel, P. J. Waddell, D. Penny, Evolution of chlorophyll and bacteriochlorophyll: the problem of invariant sites in sequence analysis. Proc. Natl. Acad. Sci. U.S.A 93, 1930-1934 (1996).
[1056] 61. A. Criscuolo, S. Gribaldo, BMGE (Block Mapping and Gathering with Entropy): a new software for selection of phylogenetic informative regions from multiple sequence alignments. BMC Evol. Biol. 10, 210 (2010).
[1057] 62. J. Strecker, A. Ladha, Z. Gardner, J. L. Schmid-Burgk, K. S. Makarova, E. V. Koonin, F. Zhang, RNA-guided DNA insertion with CRISPR-associated transposases. Science. 365, 48-53 (2019).
[1058] 63. S. E. Klompe, P. L. H. Vo, T. S. Halpin-Healy, S. H. Sternberg, Transposon-encoded CRISPR-Cas systems direct RNA-guided DNA integration. Nature. 571, 219-225 (2019).
[1059] 64. M. Krupovic, K. S. Makarova, P. Forterre, D. Prangishvili, E. V. Koonin, Casposons: a new superfamily of self-synthesizing DNA transposons at the origin of prokaryotic CRISPR-Cas immunity. BMC Biol. 12, 1-12 (2014).
[1060] 65. S. M. Crotty, B. Q. Minh, N. G. Bean, B. R. Holland, J. Tuke, L. S. Jermiin, A. V. Haeseler, GHOST: Recovering Historical Signal from Heterotachously Evolved Sequence Alignments. Syst. Biol. 69, 249-264 (2020).

### Example 3—Characterization of IsrB System Structure and Targeting Mechanism

[1061] Recent work identified a new class of RNA-guided systems, termed OMEGA, which include IscB, the likely ancestor of Cas9, and the nickase IsrB, a relative of IscB lacking the HNH nuclease domain. (FIG. 23A). IsrB is only ˜350 amino acids long, but the small size of the protein is counterbalanced by a relatively large guide RNA (˜300-nt ωRNA) (FIG. 24B, 24C). The cryoelectron microscopy structure of IsrB in complex with ωRNA and target DNA is described in this example. The overall structure of the IsrB protein shares a common scaffold with Cas9. In contrast to Cas9, however, which uses a recognition (REC) domain to facilitate target selection, IsrB uses the ωRNA, part of which forms a complex ternary structure positioned analogously to the REC lobe. The structural analyses of IsrB and the ωRNA as well as comparisons to other RNA-guided systems highlight the functional interplay between protein architecture and RNA, advancing the understanding of the biology and evolution of these diverse systems. FIGS. 24A-24C depict example IsrB domain organization relative to Cas9 (24A), interaction with ωRNA in complex at the target strand and non-target strand of DNA (24B); and the 3D and ribbon diagram depiction of the IscB and ωRNA (24C). The Applicants further characterized the ωRNA structure (25A, 25B) and the nuclease activity of the IsrB system with full length ωRNA and ωRNA with edits to stem-loop 8 (SL8), SL7-8, SL1, or edits to pseudoknots at positions 165-168, or 193-196 (FIG. 25C).

[1062] RNA-guide DNA targeting is depicted in FIG. 26, showing participating amino acid residues and nucleotide positions involved in the mechanism in aspects a-g from FIG. 26. FIG. 27 includes a snapshot of the IscrB species, with relevant comparison to IscB at FIG. 1E of Schuler et al., Science (2022) and Cas9 in Bravo et al. Nature (2022), incorporated herein by reference.

[1063] Various modifications and variations of the described methods, pharmaceutical compositions, and kits of the invention will be apparent to those skilled in the art without departing from the scope and spirit of the invention. Although the invention has been described in connection with specific embodiments, it will be understood that it is capable of further modifications and that the invention as claimed should not be unduly limited to such specific embodiments. Indeed, various modifications of the described modes for carrying out the invention that are obvious to those skilled in the art are intended to be within the scope of the invention. This application is intended to cover any variations, uses, or adaptations of the invention following, in general, the principles of the invention and including such departures from the present disclosure come within known customary practice within the art to which the invention pertains and may be applied to the essential features herein before set forth.

The application's sequence listing, which the Patent Office published only in electronic form, follows.

SEQUENCE LISTING (1608 sequences)

SEQ ID NO: 1 - protein, 348 aa, Scytonema sp.
  source 1..348: note = HK-05
MFVPVVDKNNRPLMPTTCARAKRWIKSGKATPFFKKGVFCVRLNQEPSNRNTQPIAVGLDPGSKREGYTVKSKAHTYLNIQTHAIDWVKDHVDTRRNMRRARRYRHTPCRRNRKNRLVNKQKLPPSTRSRWQWKLRICKWLVQIFPVSVFVVEDIKAKTWKKARKWNSMFSPLEVGKKWFYSEIEQLAHLEIKQGAETYEMRQNLGLKKSKNKLSNKFDAHCVDSWVLANWFVGGHVNPDNTKLIEVIPLEFHRRQLHRLQHQAGHMRPRYGGTISDGFKRGSIIKHPKYGFCYVGGWQEFPTKKDPNRKTISLHALATGKRLTQNALSKDCKFCAYSSWRATPDKSG

SEQ ID NO: 2 - protein, 344 aa, Scytonema sp.
MFVPVVSSENRPLMPTTPSRAKRWIKLGKATPFWKKGVFCVRLNVEPSNTDRQPIVAGIDPGSKREAFTVKSQAHTYLNIQTHAVDWVKDHVEVRRNMRRARRFRNTPCRQNRANRLVNKNRIPPSTKARWQWKLRIANWLTKMFPISAFIVEDIKARTWKNGRKWNASFSPLEVGKQWFYSELKKIAHLETRSGNDTYELRQSLGLKKSKQKLSNKFEAHCVDSWALANWYVEGHSQPDNTQLIEVIPLEFHRRQLHRLQHAPQNVRPRYGGTLSAGFKRGSIVKHPKYGFCFVGGWALSPTKKDPQRKTISLHSLNTGKRLCQNAVPCDCKFLSYNSWRIAN

SEQ ID NO: 3 - protein, 381 aa, Scytonema sp.
  source 1..381: note = HK-05
MNQTIRVPVLSPSGKPLMPTTPARARKWIKVGKAVGKRNKLGVFYAQLLREPSGYVTQEIVVGTDRGKAFTGIAFQTKLATIVLFHACLPGFYKSKKASKDRQSVTGKMAIRTELRRTRRGQRINRKVPFNQRNHREKRFDNRRQNKIPPSVKANREMELRILTEMSKILPITEIRDESCGGNSKNNGFGISPVTVGQEWFRLQALKIAPIVEVDSLDTGKYREHLGLVKNKKDKSIQSPETHANDAISLAATFFIQYKEFHTAKTRGHHWVGECIVTTAPFIVVARPKLFRRKLYQENYSKGGVLKRQGGTITPFGFRSGDYVQVVRKGETIRGWIGGFTNSGKTKNISIYDHNWSRIGQFNPSSTKLIKRSSRLCVVVA

SEQ ID NO: 4 - protein, 390 aa, unidentified
  REGION 1..390: note = Ga0315277_10038595
MQRLKELQNTPQVLNTSGEPLNPTSDSSMPLPHGGCGCNRKGRMSAHSVFVLSKDGTPLTPTKPAKAKKLLEAGVAKPVWNKFGQFGIQMLVETRRETPKTALTIDNGTKFEGYSVVCGNENNINVMWKLPDKKKIVNKLTERRQLRRARRYRNCRGKACRFDNRNRKGFIAPSQLVIVNSRLKAIKEILKTYPINLIGIEDVRFKNKKKGNNLSTVEVGKNKIYEFLSKHAILHKFQGHQTQKLRKLYGYHKVRDKAKEDFRSHCSDSLAMATSLTMNRHIHAGKLIVVDDSYRPIRRRLHDTQFSKGHIRYPYSHGNFRRIRKGTICELGIMCGGTKKTAWIYNWYHYRIGKSLNKIGWLSKRFFISERAKFLHSTSRMVSFGSSGSW

SEQ ID NO: 5 - protein, 366 aa, Moorea sp.
MLRVPVISPDGKPLMPTKASRARRWLNQGLAIVYPNDLNVFAVQLVNQPSSYQTQDIAIGIDPGKSFSGIAVQSNKATLWTGHLVLPYKKVRVGMDTRRMMRSRSVGFAERTRRSRRINRKIPYSQRSHRQKRFSNRRNKKVPPSIRANRQLENRVVRELNLLYPVSAIVCEIVKANGNKGFSPVMVGQYWAISQLEKIAPVTQKQGWETALKREALGLIKDKIDKSRQTVNTHAVDGIALAATHFYRRKNYYHRNGKLSVPKNCEVTNAVFSVIRRAPISRRQLHLLQFSKGGKRRKYGGTTTSHGFRKGDYVEAVKAGKAYRGWVSGETARQVSVSDINWKRIGQFTARKVRLLKRSTGLIVNH

SEQ ID NO: 6 - protein, 382 aa, Geitlerinema sp.
MRVPVVSKKGVPLMPTKPSRVRRWLKEGKAVKKWSDVGVFYVRLTVDPSNTQTQEVAVGVDPGKHFSGVAVQSAKATLFMAHLILPFETVKKRMEQRRTMRRTRRSRRINRNVPFKFRNHRSSRFNNRCQNKLPPSIRANRQLELRVVRELAAIFPISTIAWEYVRADVDLTSGRRKARSGKGFSPVMVGQRWAIREMEEIAPVVQLQGWETANLRRELGLVKSERKDEASPESHAVDGIALASSQFVRYESFHGTNVRGHRWKGSVCITPALFRVIRRPPICRRQLHLLQHAKGGTRRKYGGTVTRHGFRKGDFVRASRAGRQYWGWVSGDTARQVSVSDISWKRLGQFSASKVQLLAPNKNLLVSGASNPTRPAFCSSRA

SEQ ID NO: 7 - protein, 401 aa, Arthrospira sp.
MFDSVGEETQTRKRFITMLRVPVLSPSGKPLMPTKPSRARRWIRDGVALGKWSDLGVFYVQLTQQPSGEETQPIAVGVDPGKLYSGVGVQSPKATLFLAHLVLPFPAVKDRMKQRRMMRRGRRGRRINRNWAYSQRAHRQKRFNNRRQNKLPPSIRANRQLELRVVTELCRLFPVSNIVYEYVKAKGSKSFSPVMVGQKVMLGWLSKLAQVKTQFGYETANLRTALRLVKSKDKSAQTPETHAVDGLTLACSELVKYEPFHTANTHGHTWKGLVQLTPSIFKVIRRPPISRRQLHLMVPAKGGVRRKYGGTTTRHGVRKGDIVRAEMAGRVIVGWVSGDTHRQVSVSDLNWKRLGQFTASKVSLIARSTNLVVSGALNPTQPPLLSLPHLLREDGGFSENF

SEQ ID NO: 8 - protein, 365 aa, Microcystis sp.
MERVPVISKDGKPLMPTKPSRARRWIKEGKAIGKFNDLGIFYVQLTDEPSDNKTQPIAIGIDPGKLFSGIGVQSSLFTLWKAHLELPFKRVRERLDNRRLMRRGRRKRRINRQLPFSLRAHRQKRFSNRRQGKLAPSIRANRQLELRVVSELTKIYPITDIYFEYVKADVDLTSGRKGAKSGKGFSPVMLGQKWAIEQLSQLATVHTRFGWQTSNLRKYLRLEKSKNKAEQSPESHANDGIALACFQFLDYLPFHNSSGHGYDWKGSVKVTNAPFAVIKRPPISRRQLHLMVFSKGGKRRKYGGSTTRHGFRKGDLVSSPKGIGYISGDTEKQLSVSDTSWKRLGQITVSKIQLIRHSNGLIVSH

SEQ ID NO: 9 - protein, 358 aa, Moorea sp.
MLRVPVISPDGKPLMPTKASRARRWLNQGLAIVYPNDLNVFAVQLVNQPSSYQTQDIAIGIDPGKSFSGIAVQSNKATLWTGHLVLPYKKVRVGMDTRRMMRRTRRSRRINRKIPYSQRSHRQKRFSNRRNKKVPPSIRANRQLENRVVRELSLLYPVSAIVCEIVKANGNKGFSPVMVGQYWAISQLEKIAPVTQKQGWETALKREALGLIKDKIDKSRQTVNTHAVDGIALAATHFYRRKNYYHRNGKLSVPKNCEVTNAVFSVIRRAPISRRQLHLLQFSKGAKRRKYGGTTTSHGFRKGDYVEAVKAGKAYRGWVSGETARQVSVSDINWKRIGQFTARKVRLLKRSTGLIVNH

SEQ ID NO: 10 - protein, 292 aa, Moorea sp.
MLRVPVISPDGKPLMPTKASRARRWLLCGLAVVYPNDLNVFAVQLVNQPSGNQTQDIAIGIDPGKMFSGMAVQSSKITLWTGHLILPDKKVRERMDTRRMMRSRSVGFAEKTRRSRRIDRKVAYSQRSHRQKRFSNRRVKRVPPSIRANRQLENRVTKELCFLYPVNVIVYEVVKARGSKGFSPVMVGQYWAISQLEQIAPVIQKQGWETALKREALGLIKDKTDKSQQTVNTHAVDGIALAATHFFRRKNYYHRNGKLSVPKNCDVTNAVFSVIRRAPISRRQLHLLQFSK

SEQ ID NO: 11 - protein, 241 aa, Microcoleus sp.
VVQELSRLFPIAAIGYEKVRADVDLTSGRKGAKSGKGFSPVMVGQAYALEQMEQIAPVYTRYGWQSDGNGTAQVRSILGLTKSQDKVRPIPQTHAVDGIALACGYFVKYRPFYGKRSHGCLVLGQVKLTSAPFVVIKRPPISRRQLHLMVPKKKGVRRKYGGTVTRHGFRKGDLVRAEMAGRVSVGYVSGDTARQVSVSGLTWKRIGQFSAAKVKLLYRATGILVSCPQRLSVSGVLNPAG

SEQ ID NO: 12 - protein, 383 aa, Spirulina sp.
VGSAQKHRTHWLKRPIVLELSSMQRIPVQNPDGTPAMPTKSSRAQRWVAQGRATWVQNDLRIKVVRLKAEPSGRNTQPIVVGVDPGKLYSGIAVQSAQATLFQSHLELPYPRVRERMDHRRMLRRSRRSRRINRELPFQLRNHRQKRFNNRRKKKVAPSIRANRDLEFRVVQELSQLFPIATIGYEKVRADVDLTSGRKGAKSGQGFSPVMVGQAYAIEKMEQIAPVYTRYGWQQDGNGTAQLRSALGLKRSQDKAEQIPQTHAVDGIALACGYFIEYRPFHRKRSHGYLWFGEVKLTSAPFVVIKRPPISRRQLHLMVPRQKGLRRKYGGTVTRHGFRKGDLVRAEMAGRVSVGYVSGDTARQVSVSEFTWKRIGQFSAAKG

SEQ ID NO: 13 - protein, 410 aa, Spirulina sp.
VGSAQKHRTHWLKRPIVLELSSMQRIPAQNPDGTPAMPTKSSRAQRWVAQGKAQWVKTNLRIKVVRLKAEPSGRNTQPIVVGVDPGKLYSGIAVQSAQATLFQSHLELPYPRVRERMDHRRMLRRSRRSRRINRELPFQLRNHRQKRFNNRKQQKVPPSIRANRDLEFRVVQELSQLFPIATIGYEKVRADVDLTSGRKGAKSGQGFSPVMVGQAYAIEKMEQIAPVYTRYGWQQDGNGTAQLRSALGLKKSQDKAEQIPQTHAVDGIALACGYFIEYRPFHRKRSHGYLWFGEVKLTSAPFVVIKRPPISRRQLHLMVPRKKGLRRKYGGTVTRHGFRKGDLVRAEMAGRVSVGYVSGDTTRQVSVSEFTWKRIGQFSAAKVELLYRATGILVSCPQRLSVSGAFNPAA

SEQ ID NO: 14 - protein, 367 aa, Scytonema sp.
MRVPVLSKQGLPLMPTKPSRARRWLKQGKARIVHNDLGIFQIQLTKYADDATQPIVVGVDPGKMYTGIGVQSAKFTLWLAHLQLPFKTVKDRMEQRAMMRRGRRGRRINRKVEFSKRAHRQKRFDNRRFCKVPPSIRANRDLEWRVLDELTLIFPFENVVYEVVKAQGSKGFSPVMVGQLWQLNRLKSAFEDVREVQGWETAQIRTQLGIEKQKHSKGDAIPATHAVDGVALACSVFIKYGIIDRHSMGWKGEVTITSAPFAVIRRPPISRRQLHLMVPAKGGVRRKYGGTVTRHGFRKGDYVEATQGAKTYRGWVSGDTEKQVSVSDASWKRLRQFSAKKVRLVRRSTGLIVLPTRRLVNLLASNQ

SEQ ID NO: 15 - protein, 365 aa, Scytonema sp.
MRIPVVDSNNQPLMPTTPARARKWVESGKAIKRWSDCGQYYMQLTVEPSGYVTQDIVIGIDPSKRYSGIGVQSAKFTLYTAHLILPFQIVCDRMDARQLMRRGRRGRRINRKIEFSKRAHRQKRFTNRRQNKLPPSIRANRQLELRSVSELCKIYPITQIRYEYVRADVDLTSGRKQAKSGKGFSPVMVGQKWMLVQLEQFAPVIKIEGYQTSNTRKHLGLEKNKVDKAKAEFSTHAVDGVAIAASHFVEYRKYHLCSVDGANWFGSVSITLAPFYVIRRPPFSRRQLHLMVPVSGGIRRKYGGSVTRHGLRKGDLVNSPKGIGYVSGDTEKQISVSDANWKRLGQIASSKVTLIQRSTGLIVAC

SEQ ID NO: 16 - protein, 342 aa, unidentified
  REGION 1..342: note = Candidatus Poribacteria bacterium
MFVPVKTKDGQHLMPTHAARARKLVKRGEATPYFNNGIYCIRLNKEPSDRDTQEIAVGVDPGSKKEGFTVKSAAHTYFNVQADAHNQVGKKVAKRRELRRSRRSRKCPNRKQRTNRLANKVRIPAGTRARWDWKLRILDWFSKLFPVTHVCVEDIKARTIADAKKWNTSFSPLEVGKQWFYSEVCKKWELLTLQGYETKEIRDKLGLKKSSKKSSEGFEAHCVDSWCLAHYTVGGDSSVDNTEVMCISPIPIARRNLHREQYKKGGIRSRYGGTVLCEGLVKNTLVKHITYGLTRLAGINAKGLFALYSLDGKRLTTSAKRMDFKVLRKLNFNYRIGHASPS

SEQ ID NO: 17 - protein, 342 aa, unidentified
  REGION 1..342: note = Candidatus Poribacteria bacterium
MFVPVKSKSSKKLMPTHPNKAGMLIKKGLATPYWSNGIFCIRLNYATEDEYTQDIVVGVDPGSKKEGLTVKSASHTYLNIQADAHNKVGKKVAKRRELRRSRRSRKCPNRKQRNNRNAGKEKIPAGTRARWDWKLRILDWLSKLYPVTHVCVEDIKARTIEHAKKWNQSFSPLEVGKQWFYTQIRKRWQLRTLQGYQTKEIRDRLGLKKSSEKLSETFNAHCVDSWCLAYSTVGGESIPDNTDVFCIAPIPIKRRCLHREQEARGGKRNRYGGTVLENGLVKNTLVKHIKYGITRLSGINAKGLFSMYNLEGKRLTTHAKRADFRVLTRLNFNYRSGHSSPT

SEQ ID NO: 18 - protein, 344 aa, Scytonema sp.
MFVPVVDSNNRPLMPTTPSRARRWIKSGKATPFFRKGVFCVRLNVEPSDRNYQPVAVGVDPGSKREGFTVKSKSHTYLNVQTHAVDWVKDHVEVRRNMRRARRFRKTPCRQNRANRLVNKEKLPPSTKARWQWKLRICKWLASMFPVTTFVIEDIKARTRFGARKYNAMFSPLEVGKQWFYQELQLMAILETREGFETYSMRQELGLKKSKNKLSNKFDAHCVDSWVLANSVVTGQVKPDNTALIEIVPLEFYRRQLHRLQHQAGHVRSRYGGTMSAGLKRGSIVKHPKYGFSYVGGWQESPTKKDPKRKLISLHDITSGKRLTQNALPTDCKFLSYNSWRVAN

SEQ ID NO: 19 - protein, 344 aa, Scytonema sp.
MFVPVVDSNNRPLMPTTPSRARRWIKSGKATPFFKKGVFCVRLNVTATTANYQPIAVGIDPGSKREGFTVKSKAHTYLNIQTHSVDWVKDHVEVRRNMRRARRFRNTPCRQNRRNRLVNKEKLPPSTKARWQWKLRICKWLTLMFPVSVFIVEDVKAKTWKNARKYNVMFSLIEVGKKWFYHQLSSIANVETRTGFDTYEARQALGLKKSKNKTTTKFDAHCVDSWVLANWYVGGHVSPDNTALIEIVPLEFHRRQLHRLQYQAGHIRPRYGGTISAGFKRGSVVKHLKYGFCYVGGWQESPTKKDPNRKTISLHSLQTGKRLSQNALPTDCKFLSYNSWRIAN

SEQ ID NO: 20 - protein, 370 aa, Scytonema sp.
MLRVPVLSASGKVLMPTKASRARRWLKEGKAKVVHNDLGVFQVQLTSHPNFQNTQPIAVGIDRGKHYTGVGVQSAKFTLWLAHLQLPFKTVRERMEQRRVMRRGRRGRRINRKADFSKRAHRQKRFDNRRQCKIPPSIRANRELELRVVKELSRIYPITNIAYEIVKANGDKGFSPVMVGQKWQLKNLESYGSVKQIEGWQTANIRQQLRLHKQKHSKGDAIPATHAVDGIALAASVFIRYGVTSRNSQGWIGEVKVQPAPFTVIRRPPVSRRQLHLMVPSIGGVRRKYGGTVTRHGFRKGDYVQATQGDKTYFGWVSGDTEKQVSVSDQNWKRLGQFSKNKVRLGKRCTGLIVLPTRRLSNLLPSRESV

SEQ ID NO: 21 - protein, 349 aa, Calothrix sp.
MFVPVVDSNQRPLMPTTPSRARRWIKQKKATPFWRKGVFCVRLNVEPSNRNYQPIAVGVDPGSKREGYTVKSKAHTYLNVQTHTVDWVKDHVETRRNMRRARRFRNTPCRQNRKNRLVNKQKLPPSTKSRWQWKLRICTWLASMFPITVFVVEDIKAKTWKGARKYNVMFSPLEVGKKWFYSELEKLARLEIKTGMDTYSLRQSLGLKKSKNKLSNKFEAHCVDSWVLANWYTDGHNKPLDTELIEVIPLEFHRRQLHRLQHQKGDIRPRYGGTISAGFKRGSIVKHKKFGICYVGGWQESPTKKDPNRKTISLHSLTTGKRLTQNAVPSDCKFKTYSSWRTAYAVKTA

SEQ ID NO: 22 - protein, 349 aa, Scytonema sp.
MFVPVVDQNNRPLMPTTPSRAKRWIKSGKATPFFKKGVFCVRLNQEPSNRNIQPIAVAVDPGSKREGYTVKSRFATYLNIQTHAVDWVKDNVEVRRNMRRARRFRNTPCRQNRKNRLVNKQKLPPSTKARWQWKLRICKWLVLMFPVSTFVVEDIKAKAWKGARKWNVMFSPLEVGKKWFYSQLERLANLETRTGNDTYKMRQSLGLKKSKNKLSNKFDVHCVDSWVLANWFVGGHLKPENTQLIEVIPLDFHRRQLHRLQHFVGHIRPRYGGTMSAGFKRGSVVKHCKFGFCYIGGWQESPTKKDPSRKTISLHSLDTGKRLTQKAQICDCKFKSYGSWRISTATKVA

SEQ ID NO: 23 - protein, 352 aa, Scytonema sp.
MQRVPVLTPSGKALMPTKPSRARRWLKQGKAKVVYNDLGIFEIQLIRCPRTTDTQPISVGIDPGKLYTGLGVQSVKFTLWTAHLQLPFKIVRERMQQRAMMRRGRRGRRINRKLPYNQRAHRQQRFSNRRQGKIPPSIRANRELELRVLDELSLIYPITTIAYEIVKARGDKGFSPVMVGQRWQIENLETYAQVLQVEGWKTAQIRQQLGLYKQKHFKGDAIAATHAVDGVALACSAFIQYGVTSTHSMGWKGNVTVQPAPFAVICRPPVSRRQLHLMVVAKGGLRRKYGGTVTRHGFRKGDLVNSPKGIGYISGDTEKQISVSDANWKRLGQIASSKIQLLRRSNGLIVTY

SEQ ID NO: 24 - protein, 365 aa, Scytonema sp.
MIRVPVLDKNGKSLMPTKSSRARRWLKEGKAKIVHNDLNIFCIQLLVEPLLSDTQPIALGLDPGKKFTGIGVQSARFTLFMAHLILPFPEITKKMSGRRILRRARRGRRINRKVAFNKRAHRQKRFDNRKKAKLPPSIRANKQLELRVTKELVNLFPITQITYECVKAKGDKGFSPVMVGQKIMLEWLAQVSPTNTQQGWQTSMLRQQLGLAKDKKNKDKQIPQTHAHDGIALAVSNFMKFEEFHTANSHGRHWVGKAMVTSAPFRIIARPNLFRRQLHFENPVKDAPNHRKRKGGTVTPFGFRTADLVKAQKAGKTYIGWVGGYTQTVKTKNVSVYDHNWHRIGQFSPSKVQLLKRSTRLCVAS

SEQ ID NO: 25 - protein, 270 aa, Scytonema sp.
MRVPVLDKDGKPLMPTKPSRARRWLKEGKAKIVHNNLNVFCIQLLVEPSGYDQQPIALGLDPGKKFTGVGVQSAKFTLFMAHLVLPFPDVTKKMSGRLILRRARRGRRINRKIAFCKRAHRQKRFENRKQNKLPPSIRANKELELRVAKEIVKLFPVTQITYEYVKAKGDKGFSPVMVGQKVMLQWLEKIAPTNTQEGWHTSILRQQLGLSKDKKNKEKQTPETHAHDGIALAASNFMKFEEFYTANTHGHRACWRSPSHICTISYHCAS

SEQ ID NO: 26 - protein, 333 aa, unidentified
  REGION 1..333: note = metagenome
MVPVLDKNRIPLMPCSEKRAKKLMDRGDARPFWCKGVFCIILQREPKSRHMQDIAVAIDPGSKFNGYTVKSEAHTLLNVQAHAITDVKKKMEERAMLRRGRRGRKTPYRKCRFNRSVKERLAPSTKARWQQHLNIVKWFGKMYNIKHIVVEDIAAKTLKGAKKWNKTFSPLQVGKKWFYDTVESLGYLLHKFKGYQTALIRNSLGLKKNSKKDKKCFYGHCVDTFCLATQVIGGSGVPDNLFVKFIKPLRCYRRKLHEILPKKNGLRRNYGSTLSLGINRGTLVEHIKYGICLIGGTSKGRLSLHDLATNKRLCQNAKKEDIKILTQMRWNIY

SEQ ID NO: 27 - protein, 364 aa, Calothrix sp.
MRVPVVNQNHQPLMPTTPARARKWIASGKAVKRWSDCGQFYVQLTGKPSGRVAQDIVVGIDPGKNFSGIGVQSAKFTLYTAHLILPFQTVRDRMDSRRLMRQGRRKRRINRKVDFLNRAHRQKRFDNRCQGKLPPSIRANRQLELRIVSELCKIYPVSKIRYEYVRADVDLTSGRKKAKSGKGFSPVMVGQKWMLSQLEKFAPVVKVEGYQTASTRKHLGLTKNKLDKSNPEFNTHAVDGVTIAATAFVEYRQYHTTKVDSGDWFGNVTITSAIFKVILRPPYSRRQLHLMLPAKGGVRRRYGGSTTRHGLRKGDFVKSPKGVGYVSGDTEKQVSVSDANWKRLGQIASSKVQLIRRSNGLIVV

SEQ ID NO: 28 - protein, 398 aa, Scytonema sp.
MRVPVLDINGKPLMPTKPSRARRWLKEGKAKVVHNDLNLFCIQLLVESSGTKTQPIALGLDPGKKFTGVGVQSAKVTLFMAHLILPFPDITKKMSGRLILRRARRGRRINRTRPFNKRAHRQKRFDNRKQNKLPPSIRANKELELRVTKELVKLFPVTQIIYEYVKAKGKKGFSPVMVGQKVMLQWLEKIVPTNVQEGWQTSILRQQLGLAKDKKNKDKQTPETHAHDGVTLAASNFMKFEKFQGANTRGHRWEGFVKVTSAPFRVIARPNLFRRQLHFENPVKDVLGNRKRKGGTITPFGFRSGDLVKAEKAGKVYIGWIGGYTQTAKTKNVSVYDHNWHRLGQFSPSKVQLLQRSSRLCVTSARHWTTPFLRRPGNLAQATPLRSVELGDSRDCVE

SEQ ID NO: 29 - protein, 365 aa, Scytonema sp.
MRIPVVDSNRQPLMPTTPARARKWIQSGKAVKRWSDCGQFYVQLTIVPSGYATQDIVIGIDPGKKYSGIGVVSAKFTLYTAHLVLPFQTVRDRMDNRRLMRRGRRGRRINRKIEFSKRAHRQKRFANRRQGKLAPSIRANRQLELRIVSELCKIYPVIEIRYEYVRADVDKSSGRKKARSGKGFSPVMVGQVWMLKQLGQFAPVVKIEGYQTSLTRSHLGLTKNKVDKSKAEFNTHAVDSVAIAATSFVEYRKYHTANMDGANWFGSVTITPASFFVIRRPPYSRRQLHLMVPARGGVRRKYGGSTTRHGLRKGDLVNSPKGIGFVSGDTEKQISVSDANWKRLGQIASSKVTLIRRSTGLIVAC

SEQ ID NO: 30 - protein, 378 aa, Symploca sp.
MQRVPVISSQGKALMPTKPSRARKWLQEGKARIYKNDLNVFAIQLINEPSGHETQDVVIGIDPGKMFSGVGVQSSKATIIKLHLILPFPNVTKKMTGRRILRRARRGRRINRKLPYSQRCHRAKRFDNRVQKKLPPSIKANRQLELRVVKEICQIFPISHIVYEYIKARGDKGFSPAMVGQKVMLAWLGEIAPTATIFGWETSNIRQWLKLPKDKSDKSKPCPETHSNDGVALASSHFIRWKEWQSSSARGGYWDGEVIVTPASFKVIAKPNIYRRQLHFENPDSKKPNPTQYRKRKGGTVTPFGLRSGDFVQAQKAGQIYGGWIGGYTQTAKTKNVSIYDVNWKRIGQFSPNKVRLLKRSTKLLVSGSYPDQHSSLR

SEQ ID NO: 31 - protein, 365 aa, Scytonema sp.
MRIPVVDKDNQPLMPTTPARARKWVESGKAVKRWSKCGQFYVQLTVEPSGSDTQDIIIGIDPGKKYSGLSVQSTKFTLYTSHLVLPFQTVRDRMDARRLMRRSRRGRRINRILAFSKRAHRQKRFDNRRQGKLAPSIRANRQLELRIVCELCKIYPITEIRYEYVRADVDLTSGRSSARSGKGFSAVMVGQKWMLLQLEQFAPVIKIEGYQTASTRKHLGLEKNKVDKAKAEFNTHAVDGVAIAASHFIEYRKYHKASVDGANWFGSVSITPAPFYVIRRPPFSRRQLHLMVPLSGGIRRKYGGSVTRHGLRKADLVNSPKGIGFVSGDTEKQISVSDANWKRLGQIASSKVTLIRRSTGLIVAC

SEQ ID NO: 32 - protein, 344 aa, Scytonema sp.
MFVPVVDSNNRPLMPTTPSRARRWIKSGKGTPFFRKGVFCVRLNVEPSDRNYQPVAVGVDPGSKREGFTVKSKSHTYLNVQTHAVDWVKDHVEVRRNMRRARRFRKTPCRQNRANRLVNKEKLPPSTKARWQWKLRICKWLASMFPVTTFVIEDIKARTRFGARKYNAMFSPLEVGKQWFYQELQLMAILETREGFETYSMRQELGLKKSKNKLSNKFDAHCVDSWVLANSVVTGQVKPDNTALIEIVPLEFYRRQLHRLQHQAGHVRSRYGGTMSAGLKRGSIVKHPKYGFSYVGGWQESPTKKDPKRKLISLHDITSGKRLTQNALPTDCKFLSYNSWRVAN

SEQ ID NO: 33 - protein, 344 aa, Scytonema sp.
MFVPVVDSNNRPLMPTIPSRARRWIKSGKATPLFKKGVFCVRLNVEPYSRNNQPVAVGIDPGSKREGFTVKSKAHTYLNIQTHSVDWVKDHVEVRRNMRRARRFRNTPCRQNRTGRLVNKEKLPPSTKARWQWKLRICKWLTLLFPVSIFVVEDVKAKTWKNARKYNVMFSPIEVGKQWFYYQLRLIANLETRTGFDTYETRQELGLKKSKNKLSNKFDAHCVDSWVLANWYVGGHISPDNMTLIEIMPLEFHRRQLHRLQHQAGHIRPRYGGTISAGFKRGSIVKHPKYGFAYVGGWQESPTKKDPDRKTMSLHSLDTGKRLCQNALPTDCKFLSYNSWRLSY

SEQ ID NO: 34 - protein, 339 aa, Tychonema sp.
MQFVPVVDSNQRPLMPTTPKRAQRWISSGKATPFFRKGIFCVRLNVEPLSRHLQPVAVGIDPGSKREGYTVKSKAHTYLNQQFHAVDWVKDAEKTSTNARRARRNRKTPYRPNRQNRKRGGIPPSTKARWQLKIRVVKVFAAIFPISSIGIEDVKAIAKKSSPKWNTSFSPLEVGKKWCYSELERIAPVTEFDGYTDTYLTRQKLGLKKSKAKLSNGFNAHCVDAWVLAYLLVGGALSPENMVVMECKPIRIYRRQLHVFNPGPSGYRRPYGGSMSQGLKRGGIVKHPKYGSCYVGGEDAKKSRISLHSLGTGKRLCQNAKPTDCKFLAYNSWRTVKPS

SEQ ID NO: 35 - protein, 352 aa, Scytonema sp.
MQRVPVLTPSGKPLMPTKASRARRWLKLGKAKVVYNDLGIFQVQLVRCPRAIDAQPIAVGIDPGKLYSGVAIQSAKFTLWTAHLQLPFEIVKKRMEQRAMMRRGRRGRRINRKLPYNQRAHREKRFNNRRQSKLPPSIRANRELELRVLEELSLIYPITYVAYEIVKARGDKAFSPVMVGQKWQLENLEGYGNVREIEGWQTSQIRQQLGLQKQKHSKGDAIPATHAVDGVALACSAFIQYGVTSTHSMGWRGEVTVQSAPFAVIRHPPISRRQLHLMVFAKGGVRRKYGGTVTRHGFRKGDLVQSPKGIGYVSGDTEKQISVSDANWKRLGQIASSKIQLIHRSNRLIVTY

SEQ ID NO: 36 - protein, 346 aa, Scytonema sp.
MFVPVVDSNNRPLMPTTPARAKRWIKSGKATPFFKKGVFCVRLNVEPSNRNYQPIAVGVDPGSKREGFTVKSKSHTYLNVQTHAIDWVKDHVETRRNMRRARRFRNTPCRQNRKNRLVNKQKLPPSTKARWQWKLRICNWLSSMFPVTTFVVEDIKAKTWKNGRKWNVLFSPLEVGKNWFYSELRQLANLETRAGNETYEMRQELGLKKSKNKLSNKFDAHCVDSWVLANWFVGGHAMPDTIALIEIVPLEFHRRQLHRLQHQSGHIRPRYGGTISAGFKRGSIVKHLKYGFCYVGGWVESPTKKNPDKKTISLHDIRSGKRLTQNANPTDCKFVSYNSWRVANCA

SEQ ID NO: 37 - protein, 344 aa, Scytonema sp.; identical to SEQ ID NO: 2

SEQ ID NO: 38 - protein, 377 aa, Scytonema sp.
MYRVPVLSPSGKVLMPTKPSRARRWLKQGKAKVVHNDLSIFQIQLVRCPSAPNTQPIAVGIDPGKLFTGVGVQSAKFTLWLAHLQLPFKTVIDRMEQRAMMRRGRRGRRIDRCVEFSQRAHRQARFDNRRQCKIPPSIRANRELELRVLNELSLIYPITTVTYEIVNARGDKGFSPVMVGQNWQLENLRNDWDDVREVEGWQTANIRQQLGLHKQKHFKGDTIPATHAVDGVALACSAFIHYGITSTQSMGWKGDVTVTPAPFTIIRRPPISRRQLHLMLPAKGGVRRKYGGTITRHGFRKGDLVQATQGKKTYLGWVSGDTEKQVSVSDQSWKRLGQFSKNKVRLGKRCTGLIVLPSRKLSSLMAMRFAHATRTND

SEQ ID NO: 39 - protein, 369 aa, Symploca sp.
MQRVPVISPQGRPLMPTLPSRARRWLTEGKAKIYANDLNIFAVQLIAQPSGEETQDVVVGIDPGKYFSGVGVQSSKATLLKLHLILPFPNVTKKMTARRILRRARRGRRINRKLPYDQRCHRAKRFDNRVQKKLPPSIRANRQLELRVVKEACQLFRVSHIVYEYIKARGDKGFSPAMVGQKLMLEWLKEIASTSTLLGWETSNLRQRLKLPKDKTDKSKACEETHANDGVTLATSHFIKWKEWKDLRRNIRGGCWEGKATITSAPFKVVAKPNIYRRQLHFDNPDSKKPNPAQYRKRKGGTITPFGLRSGDFVSAQKAGQTYRGWVGGYTQTAKSKNVSVYDVNWRRIGQFSPKKVKLLKRSCKLCVS

SEQ ID NO: 40 - protein, 367 aa, Calothrix sp.
MRVAVLSQSGEVLMPTKPSRARRWLKLGIAKVINNDLGIFQIQLLKCTKTTDTQPIAVGIDPGKLYTGIGVQSAKFTLWLAHLQLPFRTVKDRMKQRREARSGRRGRRINRKLPFKKRAHREKRFDNRKRRKIAPSIRANRELELRVIKELSSIYLITTVVYEIVKARGDKGFSPVMVGQKWQVENLKKYALVKQLEGWETANIRQQLGLHKQKHSKCDAIPATHAVDGVALACIAFIKYGMVNSQSMRWKGEVNITPAPFTIIRRPPVSRRQLHLMLPSIGGKRRKYGGTTTRHGFRKGDYVKATQGSKTFFGWVSGDTKTQVSVSDVNWERLGQCTKSKVRLVRRNTGLIVLPNRKLSNLMASNH

SEQ ID NO: 41 - protein, 364 aa, Planktothrix sp.
MRIPVVAQDNKPLMPTTPARARKWIESGKAVKRWSDCGQFYLQLTVEPSGYTTQNIVIGIDPGKKFSGIGVQSAKFTLYTAHLILPFQTVRERMDTRRLMRRSRRGRRINRKIEFSKRNHRQKRFSNRRQGKLAPSIRANRQLELRIVSELFKIYPVAEIRYEYIKADIDLTSGRKQAKSGKGFSPVMVGQKWMCGQLEKFATVVKIEGYRTASTRKYLGLKKNKTDKSKAEFNTHAVDGVAIAATAFVKYRQYHTAKTDGANWFGNVVITTAQFRVIRRPPFSRRQLHLMLPAKGGMRRKYGGSTTRHGFRKGDLVKSPKGVGYVSGDTERQVSVSDANWKRLGQIASSKVQLIRRSNGLIVT

SEQ ID NO: 42 - protein, 360 aa, Moorea sp.
MLRVPVISPNGQPLMPTKASRARRWVKEGKAVIYPNALDIFAIQLVAEASGDETQSIAVGIDPGKMFTGLAVQSAQATLWTGHLVLPYPKVRDRMDTRRMMRRTRRSRRINRKIPYDQRAHRQKRFENRLAKKLPPSIKANRDLEFRVVSELFELYPISQIVYEVVKAKGTKAFSPVMVGQYQSIQRLEATFTVPVTQKMGWETSMARKGLGLAKDKTDKSRQTAETHANDGIALASFPFRKVKTQYYRNGKVVTPTVAVVTLAPFAVVSRPPISRRQLHLLQFSKGGKRRKYGGTTTRHGFRKGDYVEAVKAGQTYRGWISGDTATQVSVSNSNWKRIGQFSARKVRLLKRSTGLLVNY

SEQ ID NO: 43 - protein, 346 aa, Calothrix sp.
MFVPVVDSNQRPLMPTTPSRARRWIKQKKATPFWRKGVFCVRLNVEPSDRNYQPIAVGVDPGSKREGYTVKSKAHTYLNVQTHAVDWVKDHVETRRNMRRARRFRNTLCRKNRQNRLVNKQKLPPSTKSRWQWKLRICTWLASMFPITIFVVEDIKAKTWKGARKYNVMFSPLEVGKKWFYSELEKLAQLETKTGIDTYEMRQSLGLKKLKNKLSNKFEAHCVDSWVLANWYTEGHDKPDNTVLVEVIPLEFHRRQLHRLQHQKGHVRPRYGGTLSAGFKRGSIVKHKKYGFCYVGGWQESPTKKDPNRKTISLHSLSTGKRLTQNANLSDCKFKTYSSWRTRTCD

SEQ ID NO: 44 - protein, 344 aa, unidentified
  REGION 1..344: note = Cyanobacteria bacterium sp.
MFVPVVNSENRPLMPTTPSRAKRWIKSGKATPFWKKGVFCVRLNVEPSNTNHQPIAVGIDPGSKREAFTVKSQAHTYLNVQTHAVNWVKDHVEVRRNMRRARRFRNTPCRQNRANRLVNKNRIPPSTLSRWQWKLRIAKWLIKMFPVSVFVVEDIKARTWKNGRKWNVAFSPLEVGKCWFYSELKSIAHLETRTGNDTYEMRQALGLKKHAQKLSNKFEAHCVDSWVLAFLYVGGHLIPDNTALIEVIPLEFHRRQLHRLQHSAGHVRPRYGGTLSAGFKRGSIVKHSKYGFCYVGGWQESPTKKDPNRKTVSLHNVQTGRRITQNAIVSDIKFLAFNSWRVGG

SEQ ID NO: 45 - protein, 411 aa, Trichormus sp.
LFKDKTFWIDWARGLKLVWENRSTWAKPKTAFSSYSKDYLFMRVPVISAKNIPLMPTKPSRARRWIKSGIAIGKFNKLGIFYVQLIAEPSDIQTQEIVAGLDPGKMFSGVAVQSQKYTLQMLHLVLPFKTVKDRMEQRAMMRRGRRGRKINRKLSFSQRSHRQTRFDNRRGSKLPPSIRANKDLEYRTISLLSEVYPIQTIVIEEVKARGDKRFSPVMVGQQYQIKRLSKLANVELKKGWETSNLRKHLKLHKEKSDKSLQIPETHAVDAVTLACSEFVKYQIWEKVKSHGASWIGDVTITNSQFTILRRPPISRRQLHLMVPSKGGNRRKYGGTTTGHGFRKSDFVEATQGKKSFFGWVSGDTEKHVSVSDCNWKRFGQCTAKKVRLIQRNTGLIVLSTRKMFNLMASNH

SEQ ID NO: 46 - protein, 349 aa, Calothrix sp.; identical to SEQ ID NO: 21

SEQ ID NO: 47 - protein, 367 aa, Calothrix sp.; identical to SEQ ID NO: 40

SEQ ID NO: 48 - protein, 374 aa, Moorea sp.
MLRVPVISPDGRPLMPTKASRARRWINKGLAVVYQNDLNVFAVQLVNKPSGEETQDIAVGVDPGKLFSGIAVQSNNTTLWTGHLVLPYKKVRDSAEPTLRERMDTRRMMRSRSVGFAERTRRSRRINRKVCYSQRSHRQKRFSNRREKKVPPSIRANRQLEQRVIKELSLLYPLRVIVYEVVKARGSKGFSPVMVGQYWSISQLERIAPVIQKQGWETALKREALGLVKDKADKSRLSVNTHAVDGIALAATHFFRRKNYYHSNGKLSVPRNCEVTDATFYVIKRAPISRRQLHLLQFYKGGKRRKYGGTTTSHGFRKGDYVEAVKAGKQARGWVSGETARQVSVSDINWKRIGQFTARKVRLLKRSTGLIVNH

SEQ ID NO: 49 - protein, 358 aa, Moorea sp.
MLRVPVISPDGKPLMPTKASRARRWLNQGLAIVYQNDLNVFAVQLVNQPSGDQTQDIAIGIDPGKMFSGMAVQSNNVTLWTGHLVLPYKKIRDRMDTRRMMRRTRRSRRINRKVPFSQRSHRQKRFSNRTGKKVPPSIRANRQLENRVVKELCLLYPVKVIVYEVVKAIGNKGFSPVMVGQYWAISQLEKIAPVTQRQGWETSLKREALGLVKDKTDKSRQTVNTHAVDGIALAATHFFRRKNYYHSNGKLSIPENCNVTDAVFSVIRRAPISRRQLHLLQFSKGGKRRKYGGTTTSHGFRKGDYVEAVKAKKTYRGWVSGETVKQVSVSDINWKRIGQFTARKVRLLKRASGLIVNH

SEQ ID NO: 50 - protein, 410 aa, Spirulina sp.; identical to SEQ ID NO: 13

SEQ ID NO: 51 - protein, 346 aa, Calothrix sp.; identical to SEQ ID NO: 43

SEQ ID NO: 52 - protein, 366 aa, Moorea sp.
MLRVPVISPDGRPLMPTKASRARRWLNQGLAVIYQNDLNVFAVQLVNQPSEEQTQDIAIGIDPGKMFSGIAVQSNKATLWTGHLVLPYKKVRERMDTRRMMRSRSVGFAEKTRRSRRIDRRVPYSQRSHRQKRFSNRVNKKVPPSIRANRKLEQRVAKELSLLYPVKAIVYEVVKARGDKGFSPVMVGQYWSISQLEKIAPVTQKQGWETALKREALGLVKDKTDKSRQTVNTHAIDGIALAATHFLRRKNYYHSKGKLSIPENCNITNALFSVIRRAPISRRQLHLLNFRACGKRRKYGGTTTSHGFRKGDYVEAVKAGKITHGWVSGETAKQVSVSDINWKRIGQFTARKVRLLKRSTGLLVNN

SEQ ID NO: 53 - protein, 366 aa, Moorea sp.
MLRVPVISPDGKPLMPTKASRARRWLLCGLAVVYPNDLNVFAVQLVNQPSGNQTQDIAIGIDPGKMFSGMAVQSSKITLWTGHLILPYKKVRERMDTRRMMRSRSVGFAEKTRRSRRIDRKVAYSQRSHRQKRFSNRRVKRVPPSIRANRQLENRVTKELCFLYPVNVIVYEVVKARGSKGFSPVMVGQYWAISQLEQIAPVIQKQGWETALKREALGLIKDKTDKSQQTVNTHAVDGIALAATHFFRRKNYYHRNGKLSVPKNCDVTNAVFSVIRRAPISRRQLHLLQFSKGGKRRKYGGTTTSHGFRKGDYVEAVKAGITYRGWVSGETVRQVSVSDVNWKRIGQFTARKVRLLKRSTGLIVNH

SEQ ID NO: 54 - protein, 292 aa, Moorea sp.; identical to SEQ ID NO: 10

SEQ ID NO: 55 - protein, 390 aa, Calothrix sp.
MRVPVISKDNLPLMLTKPSRARRWIKEGKAIGKFNKLGIFYVKLLTEASDEKIQEVVIGLDPGKMFSGVAVQSKKYTLQMLHLVLPFKTVKNRMEQRSIMRRGRRGRRINRKLSFKKRSHRQARFDNRKNKKLPPSIRANKDLEFRVINLLCELYPVSTIVIEEVEAKGSKSFSPVMVGQRFQINRLSEIASIKLKKGWETSNLRKHLGMHKEKTDKSLQIPETHAVDAITLASSEFVKYKSFEGKNTRGASWVGNVSITESQFTIVRRPPISRRQLHLMVPTKGGNRRKYGGTTTRHGFRKGDYVKATQGKKTFFGWVSGDTETKVSVSDADWKRLGQCTAKKVQLVTRSTGLIIKATKVVSPSETLCERVASLSGLKTLSFPHPARSL

SEQ ID NO: 56 - protein, 358 aa, Moorea sp.
MIRVPVISPNGKPLMPTKASRARRWLKQGLAVVYPNDLKVFAVELVNQPSGEQIQDVAIGIDPGKMFSGVAVQSDKATLWTGHLVLPYKKVRERMDTRRMMRRNRRSRQINRKVPYSQRSHRQKRFSNRVAKKVPPSIRANRQLEQRVAKELSLLYPVKAIVYEVVKARGNNGFSPVMVGQYWSISQLKEIAPVTQRQGWETALKREALGLVKDKTDKSRQTVNTHAVDGIALAATHFFRRRNYYHSKGKLSIPENCNVTNALFFVIRRAPISRRQLHLLQFSLGGKRRKYGGTTTSHGFRKGDYVEAVKAGKTYRGWVSGETARQVSVSDINWKRIGQFTARKVRLLKRSTGLIVNN

SEQ ID NO: 57 - protein, 329 aa, Moorea sp.
MLRVPVISPDGKPLMPTKASRARRWLLCGLAVVYPNDLNVFAVQLVNQPSGNQTQDIAIGIDPGKMFSGMAVQSSKITLWTGHLILPYKKVRERMDTRRMMRSRSVGFAEKTRRSRRIDRKVAYSQRSHRQKRFSNRRVKRVPPSIRANRQLENRVTKELCFLYPVNVIVYEVVKARGSKGFSPVMIGQYWAISQLEQIAPVIQKQGWETALKREALGLIKDKTDKSQQTVNTHAVDGIALAATHFFRRKNYYHRNGKLSVPKNCDVTNAVFSVIRRAPISRRQLHLLQFSKGGKRRKYGGTTTSHGFRKGDYVEAVKAGITSTRLGER

SEQ ID NO: 58 - protein, 314 aa, Moorea sp.
MLRVPVISPDGKPLMPTKASRARRWLLCGLAVVYPNDLNVFAVQLVNQPSGNQTQDIAIGIDPGKMFSGMAVQSSKITLWTGHLILPDKKVRERMDTRRMMRSRSVGFAEKTRRSRRIDRKVAYSQRSHRQKRFSNRRVKRVPPSIRANRQLENRVTKELCFLYPVNVIVYEVVKARGSKGFSPVMVGQYWAISQLEQIAPVIQKQGWETALKREALGLIKDKTDKSQQTVNTHAVDGIALAATHFFRRKNYYHRNGKLSVPKNCDVTNAVFSVIRRAPISRRQLHLLQFSKRLSEKSHLLHPSPLNPPILGDF

SEQ ID NO: 59 - protein, 344 aa, Tolypothrix sp.
MFVPVVNSENRPRMPTTPSRAKRWIKSGKATPFWKKGVFCVRLNVEPSNTNSQPIAVGIDPGSKREAFTLKSQAHTYLNVQTHAVDWVKDHIEVRRNMRRSRRFRNTPCRQNRTNRLVNKNRIPPSTKARWQWKLRIANWLTKMFPVSTFVVEDIKARTWKNGCQWNASFSPLEVGKQWFYSELRKIAHVETKSGNETYQLRQSLGLHKSQQKLSNKFEAHCVDSWVLANWSVQGHSRPDNTQLIEAVPLEFHRRQLHRLQYARQHIRSRYGGTMSAGFKRGSIVKHPKYGFCFVGGWQESPTKKNPDRKTISLHSLNTGQRLCQNAVPTDCKFLSYNSWRVVN

SEQ ID NO: 60 - protein, 360 aa, Moorea sp.
MLRVPVISPNGQPLMPTKASRARRWVKEGKAIIYPNALDIFAIQLVAEPSGEETQSIAVGIDPGKMFTGLAVQSAQATLWTGHLVLPYPKVRDRIDTRGMMRRTRRSRRINHKIPYDQRAHRQKRFENRLAKKLPPSIKANRDLEFRVVSELFELYPISQIVYEVVKAKGTKAFSPVMVGQYQSIQRLEATFTVPVTQKMGWETSMARKGLGLTKDKTDKSRQTAETHANDGIALASFPFRKVKTQYYRNGKVVTPTVAVVTLAPFAVVSRPPISRRQLHLLQFSKGGKRRKYGGTTTRHGFRKGDYVEAVKAGQTYRGWISGDTATQVSVSNSNWKRIGQFSARKVRLLKRSTGLLVNY

SEQ ID NO: 61 - protein, 336 aa, unidentified
  REGION 1..336: note = Ardenticatenales bacterium
MQYVPVVSSLGKPLMPCHAARARQLVRNGRAVRRFNKGIFYIQLLGRAEGEIQPIAVGIDPGSKREGFTVKSEAHTYLNVQAEAVTWVGKHIEVRKGLRRGRRGRKTPYRKNRQNRVRGGIPPSTKARWQLKLRVLKWLAALYPISIVVVEDIAAVTKEGKRRWNKSFSPLEVGKAWFYAEVEKLAELWIFKGYQTAEMRHAMGLSKSKQKLSTEWETHCVDSFVLATIVMGGPIEPDNKEMLILVPLQLHRRAQQRANPQKGGVRPLYGGTKSLGFKRGSWVKHPRWGVCYVGGASAGKGGISLHSLTTGKRLTQSAKPETCHFLCHASWRVFHT

SEQ ID NO: 62 - protein, 358 aa, Moorea sp.
MLRVPVISPDGKPLMPTKASRARRWLNQGLAVIYQNDLNVFAVQLVNQPSGEQTQDIAIGIDPGKMFSGIAVQSNNATLWTGHLVLPYKKVRVRMDTRQMMRRTRRSRRINRKVPYSQRSHRQKRFSNRVSKKVPPSIRANRQLEQRVAKELSLLYPVKAIVYEIVKARGNKGFSPVMVGQYWSISQLEKIAPVTQKQGWETALKREALGLVKDKTDKSRQSVNTHAVDGIALAATHFFRRKNYYHSKGKLSVPENCNITNTLIFVIRRAPISRRQLHLLQFSKGGKRRKYGGTTTSHGFRKGDYVEAVKAGKVTRGWVSGETARQVSVSDIDWKRIGQFTARKVRLLKRSTGLIVNY

SEQ ID NO: 63 - protein, 360 aa, Moorea sp.; identical to SEQ ID NO: 60

SEQ ID NO: 64 - protein, 364 aa, Calothrix sp.
MRVPVVDKDHQPLMPTTSARARKWVASGKAIKRWSDCGQLYVQLTCVPSGRETQDIVIGIDPGKKFSGIGVQSAKFTLYTAHLILPFQAVRDRMDARRLMRRGRRGRRINRKVDFSKRAHRQKRFDNRRQGKLPPSIRANRQLELRIVCELCQLYPVSEIRYEYVRADVDLTSGRKKAKSGKGFSPVMVGQKWMLSQLELFAPVAKVEGYQTALTRKYLGLVKNKVDKSKSEFNTHAVDGVAIAASAFVKYREYHKAHVDGADWFGRVVITPAVFKVIRRTPYSRRQLHLMLPTKGGLRRKYGGSTTRHGLRKGDLVYSPKGIGYVSGDTEKQISVSDANWKRLGQIVSRKVQLIRRSNGLIVA

SEQ ID NO: 65 - protein, 358 aa, Moorea sp.; identical to SEQ ID NO: 62

SEQ ID NO: 66 - protein, 314 aa, Moorea sp.; identical to SEQ ID NO: 58

SEQ ID NO: 67 - protein, 358 aa, Moorea sp.; identical to SEQ ID NO: 9

SEQ ID NO: 68 - protein, 358 aa, Moorea sp.
MLRVPVISPDGKPLMPTKASRARRWLLCGLAVVYPNDLNVFAVQLVNQPSGNQTQDIAIGIDPGKMFSGMAVQSSKITLWTGHLILPYKKVRERMDTRRMMRKTRRSRRIDRKVAYSQRSHRQKRFSNRRVKRVPPSIRANRQLENRVTKELCFLYPVNVIVYEVVKATGRKGFSPVMVGQYWAISQLEQIAPVIQKQGWETALKREALGLIKDKTDKSQQTVNTHAVDGIALAATHFFRRKNYYHRNGKLSVPKNCDVTNAVFSVIRRAPISRRQLHLLQFSKGGKRRKYGGTTTSHGFRKGDYVEAVKAGKQARGWVSGETVRQVSVSDVNWKRIGQFTARKVRLLKRSTGLIVNH

SEQ ID NO: 69 - protein, 365 aa, Microcystis sp.
MARVPVISKDGKPLMPTKPSRARRWIKEGKAIGKFNDLDIFYVQLTDEPSDNKTQPIAIGIDPGKLFSGIGVQSSLFTLWKAHLELPFKRVKERMDNRCLMRRGRRGRRINRQLPFNLRAHRQKRFLNRRQGKLAPSIRANRQLELRVVSELTKIYPITDIYFEYIKADVDLTSGRKGAKSGKGFSPVMVGQKWAIEQLSQLATVHTRFGWQTSNLRKHLRLEKSKNKAEQSPESHANDGIALACFQFLDYLPFHTSNGHGYDWKGSVKVTNAPFAVIKRPPISRRQLHLMVFSKGGKRRKYGGSTTRHGFRKGDLVSSPKGIGYVSGDTEKQLSVSDANGQRLGQIAVSKIQLIRRSNGLIVSH

SEQ ID NO: 70 - protein, 358 aa, Moorea sp.; identical to SEQ ID NO: 68

SEQ ID NO: 71 - protein, 366 aa, Moorea sp.; identical to SEQ ID NO: 52

SEQ ID NO: 72 - protein, 223 aa, Microcoleus sp.
MFVPVVNSENRPLMPTTNARAKRWIKSGKATPFWKKGVFCVRLNVEPSNHNYQPIAVGIDPGSKREGFTVKSKSHTYLNVQTHAVDWVKDHVEVRRNMRRARRFRNTPCRQNRVNRLVNKNRIPPSTRARWQWKLRIVNWLSFMFPVSVFVVEDIKARSYKNGRKWNVSFSPLEVGKHWFYSELRKIVHLEIRTGNDTCNLRQDLGIKKSKQKLSSKFEAPRC

SEQ ID NO: 73 - protein, 337 aa, Microcystis sp.
MARVPVISKDGKPLMPTKPSRARRWIKEGKAIGKFNDLDIFYVQLTDEPSDNKTQPIAIGIDPGKLFSGIGVQSSLFTLWKTHLELPFNLRAHRQKRFSNRKQGKLAPSIKANRQLELRVVSELTKIYPITDIYFEYIKADVDLTSGRKGAKSGKGFSSVMVGQKWTIEQLSKLATVHTRFGWQTSNLRKHLRLEKSKNKAEQSPESHANDGIALACFQFLDYLPFHNSNSHGYDWKGYVKVTNAPFAVIKRPPISRRQLHLMVFSNGGKRRKYGGSTTRHGFRKGDLVSSPKGIGYVSGDTEKQLSVSDTNGQRLGQIAVSKIQLIRRSNGLIVSR

SEQ ID NO: 74 - protein, 365 aa, Microcystis sp.
MARVPVISKDGKPLMPTKPSRARRWIKEGKAIGKFNDLDIFYVQLTDEPSDNKTQPIAIGIDPGKLFSGIGVQSSLFTLWKAHLELPFKRVRERMDNRRLMRKGRRGRRINRQLPFNLRAHRQKRFSNRKQGKLAPSIRANRQLELRVVSELTKIYPITDIYFEYVKADIDLTSGRKGAKSGKGFSSVMVGQKWAIEQLSQLATVHTRFGWQTSNLRKHLGLEKSKNKAEQSPESHANDGIALACFQFLDYWQFHNYNGHGYDWKGSVKVTNAPFAVIKRPPISRRQLHLMVFSKGGKRRKYGGSTTRHGFRKGDLVSSPKGIGYVSGDTEKQLSVSDTSWKRLGQIAVSKIQLIRRSNGLIVSR

SEQ ID NO: 75 - protein, 366 aa, Calothrix sp.
MRVPVISYDGKPLMPTKSSRARRWIKEGKAIGKWSKLNVFYVQLLKPASDNKLQDVVVGIDPGKMFTGIAVLSQKETLLTAHVELPFKNVTKRMVQRSMMRRGRRGRRINRKLPFDKRSHRQNRFNNRRQEGMPPSVKASKNLELRLLRLIVDLYPVSHVVYEVVKAKGNKGFSPVMVGQKLICKKLSSATKLFNFTTREGYETSVTRKHLRLEKEKGNKSLQIPQTHAVDGIALAATHWLKYTAIDKNSMGSKGELTLTDSIFLIVSRPPISRRQLHLMVPSKGGKRRKYGGTVTQHGYRKGDYVEATKADKTYRGWVSGDTKTQVSISDANWKRLGQFTSKKVKLIKRSTGLIVTSQKYKVHGG

SEQ ID NO: 76 - protein, 366 aa, Calothrix sp.
MRVPVISYDGKPLMPTKSSRARRWIKEGKAIGKWSKLNVFYVQLLKPASDNKLQDVVVGIDPGKMFTGIAVLSQKETLLTAHVELPFKNVTKRMVQRSMMRRGRRGRRINRKLPFDKRSHRQNRFNNRRQEGMPPSVKASKNLELRLLRLIVDLYPVSHVVYEVVKAKGNKGFSPVMVGQKLICKKLSSATKLFNFTTREGYETSVTRKHLRLEKEKGNKSLQIPQTHAVDGIALAATHWLKYTAIDKNSMGSKGELTLTDSIFLIVSRPPISRRQLHLMVPSKGGKRRKYGGTVTQHGYRKGDYVEATKADKTYRGWVSGDTKTQVSISDANWKRLGQFTSKKVNLIKRSTGLIVTSQKYKVHGG

SEQ ID NO: 77 - protein, 342 aa, unidentified
  REGION 1..342: note = Burkholderiales bacterium
MQYVPVISSSGQRLMPCHAARARQLVREGKALRRFDRGLFYLKLLSRETGVVQPIAVGIDPGSKKEALTVKSAAHTYLNIQADAVTWVKDAETLSTQMRRTRRGRKTPYRQMRANRNRGQIRLPPSTRARWSWKLRLCHWLTRYYPIEVFVVEDVAAVTKLGQRRWNRSFSPLEVGKLWFYSELSKLAQVKTLKGYETKAERDKLGLNKSKQKMSDKFEAHCVDSWTLANAWVGGHVAPENTFMLYIVPLRFHRRQLHLLQPAKGGIRKPYGSTNSLGFKRGSWVKHPKFGVCYVGGTTQGTISLHSLQTGQRQTKVKPDTVKFLTYASWRIRKGVSASAAS

SEQ ID NO: 78 - protein, 358 aa, Moorea sp.
MLRVPVISPDGKPLMPTKASRARRWLNQGLAIIYPNDLNVFAVQLVNQPSGDQIQDIAVGVDPGKLFSGIAVQSNNATLWTGHLVLPYKKVRVRMDTRRMMRRTRRGRRINRKVAYSKRSHRQKRFSNRIGKKLPPSIRANRQLENRVAKELCLLYPVNAIVYEVVKANGNKGFSPVMVGQYWAISQLEEIAPVTQRQGWETALKREALGLIKDKTNKSRQTVNTHAVDGIALAATHFFQRKNYYHRNGKLSIPKNCDVTDAVFSVIRRAPISRRKLHLLQFSKGGKRRKYGGTTTSHGFRKGDYVEAVKAGKITRGWVSGETTKQVSVSDINWKRIGQFTARKVRLLKRATGLIVNH

SEQ ID NO: 79 - protein, 358 aa, Moorea sp.; identical to SEQ ID NO: 78

SEQ ID NO: 80 - protein, 366 aa, Nostoc sp.
MRVSVLNPDGSPAMPTKPSRARRWLKTGRAKVVHNDLNLFCVQLICEPSGYEVQDIALGIDPGKMFTGVGVQTSRFTLFTAHLVLPFKAITKKMDGRRILRRARRGRRINRKVAFHLRAHRQKRFSNRRQGKLPPSIRANRQMELRVVKELIKLFPVSDIRYEIVKAKTEKGKGRGFSPVMVGQKFMLQWLEEMRPTVSQEGWQTSTLRQQLGLAKDKSDKSKQVPETHANDGIALAASHFMSYQSFQSRNERGHHWTGKVTVTKSVFRVISRPNLYRRQLHFENPVSGVKGNRKRKGGTITPFGFRSGDLVRAEKAGQSVLGWIGGYSEASKVVSVYDINWRRYGQFKASKVELLQRSANLCVSR

SEQ ID NO: 81 - protein, 329 aa, Moorea sp.; identical to SEQ ID NO: 57

SEQ ID NO: 82 - protein, 350 aa, Fischerella sp.
VKFVPVVDQSNRPLMPTTPSRAKRWIKSGKATPFFKKGVFCVRLNQEPSNRNTQPIAVGVDPGSKRESYTVKSQSHTYLNIQTHAVDWVKDHVEVRRNMRRARRFRNTPCRQNRKNRLVNKQKLPPSTKARWQWKLRICKWLTLMFPISTFVIEDIKAKTLIGAKKWNVMFSPLEVGKKWFYSELERLANLETRTGNDTYEMRQALGLKKSKNKLSNKFDAHCVDSWVLANWFVGGHQKPENTQLIEIVPLEFHRRQLHRLQHSVGHIRSRYGGTISAGFKRGSVVRHLKFGFCYVGGWQESPTKKEPNRKTISLHSFETGKRLTQNATPKDCIFKTYGSWRISTATKVA

SEQ ID NO: 83 - protein, 369 aa, Brasilonema sp.
MRVPVLSPEGQPLMPTKPSRARRWLKSGKAKVVHNDLGIFTVQLVSKPSDTKTQPISVGVDPGKKYTGIGVQSAKVTLWMAHLQLPFDTVKRRMEQRRMMRRGRRGRRINRKVPYSQRAHRQARFDHRRFKKVPPSIRANRQLELRIIKELAKIYPLTTAVWEVVVARGDKGFSPVMVGQYWAIDQLKILLPVVTQEGWQTFLLRQQLRLEKQKTKKGDAIPATHAVDGISLAASQFVRYRQLKGKQGWWEGSVDITPAPFVVVRRPPICRRQLHLMVPSKAGVRRKYGGTITRHGFRKGDYVKAEMARRVVYGWVSGDTERQVSVSDINWKRIGQFSAKKTCLVKRSTGLLVLPNKGLSNLPPLRGQI

SEQ ID NO: 84 - protein, 353 aa, Moorea sp.
LMPTKASRARRWLNQGLAVIYQNDLNVFAVQLVNQPSEEQTQDIAIGIDPGKMFSGIAVQSNKATLWTGHLVLPYKKVRERMDTRRMMRSRSVGFAEKTRRSRRIDRRVPYSQRSHRQKRFSNRVNKKVPPSIRANRKLEQRVAKELSLLYPVKAIVYEVVKARGDKGFSPVMVGQYWSISQLEKIAPVTQKQGWETALKREALGLVKDKTDKSRQTVNTHAIDGIALAATHFLRRKNYYHSKGKLSIPENCNITNALFSVIRRAPIIRRQLHLLNFRACGKRRKYGGTTTSHGFRKGDYVEAVKAGKITHGWVSGETAKQVSVSDINWKRIGQFTARKVRLLKRSTGLLVNN

SEQ ID NO: 85 - protein, 337 aa, Arthrospira sp.
MQSVPVVDINQRPLMPTTLNRAIRWNKSGKATLFYKKGVLCARLNVEPSSRFTQPLAVGMAPGSKREGFTVKSRTRTYLNIQAHAVDWVKNAVEAKRNARRARRYRNTPCRKNCPNRKRGGIPPSTKARWQWKLRICHWLTKLFPVTAFVVEDIKARTFKNCGQWNVLFSPMEVGKKWFYSELERIAILHTLKGHETAELRNQLGLKKSKQKLSDKFSAHCVDSWVLANWYTEGHEQPDNNELMVVIPLRFHRRQLHRFQPSKGGTRSPYGGTISEGFKRGGIAKHPKYGIVYIGGASKGRVSLHSLETGKRLCPNAKPSDIKFLSFNSWRFQYAAS

SEQ ID NO: 86 - protein, 291 aa, Microcoleus sp.
MQRVPVISPDGRPLMPTKPLRARRWLKEGIARIYLNDLNIFAIVLINEPSGYETQNVVIGIDPGKMFSGVGIQSSKATLLKLHLILPFPNVTKKMTARRILRRVRRGRRINRKLPYDQSCHRAKRFDNRVQKKLPPSIRANRQLELRVVKEITRLFPISSIVYEYIKARGNKGFSPAMVGQKVMLEWLEKIAPTATQFGWQTSNIRQWLKLPKDKADKSKAVEETHSNDGVALAASHFIKWKEWESSNARGGNWKGNVVVTSAPFKVIAKPNLYRRQLHFENPDSHKPNPN

SEQ ID NO: 87 - protein, 337 aa, Arthrospira sp.; identical to SEQ ID NO: 85

SEQ ID NO: 88 - protein, 337 aa, Limnospira sp.; identical to SEQ ID NO: 85

SEQ ID NO: 89 - protein, 365 aa, Microcystis sp.
MARVPVISKDGKPLMPTKPSRARRWIKEGKAIGKFNDLDIFYVQLTDEPSDSKTQPIAIGIDPGKLFSGIGVQSSLFTLWKAHLELPFKRVRERLDNRRLMRRGRRKRRINRQLSFNLRAHRQKRFSNRRQGKLAPSIRANRQLELRVVSELTKIYPITDIYFEYIKADIDLTSGRKGAKSGKGFSSVMVGQKWAIEQLSRLATVHTRFGWQTSNLRKYLRLEKSKNKAEQSPESHANDGIALACFQFLDYWPFHNTNGHGYDWKGYVKVTNAPFAVIKRPPISRRQLHLMVFSKGGKRRKYGGSTTGHGFRKGDLVSSPKGIGYVSGDTEKQLSVSDTNGQRLGQIAVSKIQLIRRSNGLIVSR

SEQ ID NO: 90 - protein, 241 aa, Microcoleus sp.; identical to SEQ ID NO: 11

SEQ ID NO: 91 - protein, 352 aa, Moorea sp.
MPTKASRARRWLNQGLAVIYQNDLNVFAVQLVNQPSEEQTQDIAIGIDPGKMFSGIAVQSNKATLWTGHLVLPYKKVRERMDTRRMMRSRSVGFAEKTRRSRRIDRRVPYSQRSHRQKRFSNRVNKKVPPSIRANRKLEQRVAKELSLLYPVKAIVYEVVKARGDKGFSPVMVGQYWSISQLEKIAPVTQKQGWETALKREALGLVKDKTDKSRQTVNTHAIDGIALAATHFLRRKNYYHSKGKLSIPENCNITNALFSVIRRAPIIRRQLHLLNFRACGKRRKYGGTTTSHGFRKGDYVEAVKAGKITHGWVSGETAKQVSVSDINWKRIGQFTARKVRLLKRSTGLLVNN

SEQ ID NO: 92 - protein, 365 aa, Anabaena sp.
MIRVPVLDESGKPLMPTKPSRARRWLKEGKAKIVHNNLNIFCLQLLVKPSNDDTQPIALGLDPGKKFTGIGVQSANFTLFMAHLILPFSDITKKMSGRLILRRARRGRRINRNAAFSKRAHRQKRFNNRKQHKLPPSIRANKELELRVTKELVKLFPITQITYEYIKAKGDKGFSPVMVGQKVMLQWLEEIAPTNTQEGWQTSILRQQLGLAKDKKDKSKQIPETHAHDGIALAASNFMRFEKFHTANTRGYHWVGEVAVTSAPFRVISRLRVFRRQLHFENPVKDVPGNRKRKGGTVTPFGLRSGDLVKAEKAGVTYVGWIGGYTQTTKTKKVSVYDHNWHRLGQFSPFKVQLIKRSTRLCVAV

SEQ ID NO: 93 - protein, 364 aa, Nodularia sp.
MRVPVVDKDHQPLMPTTPGRARKWIASGKAVKHWSDTGQFYVQLKIEPSGCDTQDIVIGIDPGKKFSGIGVQSAKLTLYTAHLILPFQAVRDRMDARRLMRRGRRGRRINRKVDFSKRAHRQKRFSNRRQDKLAPSIRVNRQLELRVVSELGQIYPVSEIRYEYVKADVDLTSGRKKSRSGRGFSAVMVGQKWMLRQLEQFAPVVKVEGYQTASTRKYLGLIKNKLDKSKAEFNTHAVDGVAIAATAFVEYQKYHTTKIDGANWFGCVTVTPAIFKVIRRPPYSRRQLHLMVPAKGGVRRKYGGSTTRHGLRKGDLVSSPKGIGYVSGDTEKQVSVSNANWKRLGQITSSKVQLIRRSNGLIVA

SEQ ID NO: 94 - protein, 394 aa, Oscillatoria sp.
MNPKTRIPVLAPDNTPLMPTLYRRAQQWVDTGKAKWVSNDLNIKQVRLLQEPSSRNAQLIVIGIDPGKKFSGVAVQSSQFTLFTAHLILPFPSITKKMTGRRILRRARRGRRINRKVVFHLGAHRQKRFDNRRQKKLVPSIHANRAFELRLVKELMRLFPVSTIVYEYIQAKGDKAFSPVMVGQKVMLGWLGKLGSVVTQFGWKTANIRNYLGLVKQKTDKSAQTPKTHAVDGIALAASQFVDYKAFHRLREHGHHWVGSVRLTPSPFLVIGRPNLFRRQLHFENFSKSGIRKRKGGTITPFGFRSGDFVQAQKAGKTYRGWIGGFSEVNKVVWCLRPQLASDWTVFSKQSPVNQTEYKTMCRVNPLADSRRGVGRRYPSPTCKRGWGSAAKSC

SEQ ID NO: 95 - protein, 358 aa, Moorea sp.; identical to SEQ ID NO: 62

SEQ ID NO: 96 - protein, 384 aa, Microcoleus sp.
VSDGGKEQVTFIGLSPKMQRVPVISPDGLPLMPTKASRARRWLNEGKAKIYSNDLNVFAIQLVGKPSGHETQDVVIGIDPGKLFSGVGVQSSKTTLLKLHLILPFPNVTKKMTARRILRRARRGRRINRKLPYDQRCHRAKRFDNRVQKKLPPSIRSNRQLELRVIKEIMRLFPVSNIVYEYIKARGDKGFSPAMVGQKVMLQWLSKIAPTDTRYGWQTSNLRQWLKLPKDKTDKSKAVEETHSNDGVALAASHFIKWREWQSSNARGGCWEGEVIVTPAPFKVIAKPNIYRRQLHFENPDSHKPNPSQYRKRKGGTITPFGFRSGDFVQAEKASQIYRGWIGGYTQTGKSKNISVYNHEWKRIGQFSPTKIKLLKRSCKLCVA

SEQ ID NO: 97 - protein, 312 aa, unidentified
  REGION 1..312: note = Deltaproteobacteria bacterium sp.
MQKVFVLDKIGKPCLPCHPARARKLLRQNKAKVIQVVPFTIQLNYVIDNPVGSFTVGVDDGSKHVGVAIANDKTNEVVFKGQIELRQDVKRLMKQRREYRRTRRSRKLRHRQPRFNNRTGCKILPSIRCRKESILRFLKDMMKRINIVGVVVEEVKFNHAKHRWGQQFSLVEQGKNYLREQILNLGLFYRSIFGYETKTRRIDLGLSKTHSNDAISMACTKNPFINSLEWIIKPRRTKVWKNNPTKVNNEKNGFRHYDLVKATHRTKGYVIGSIRSLKAQVITLRTRWDNNFPVSYNKAKLLQRFNGLVYVF

SEQ ID NO: 98 - protein, 337 aa, Limnospira sp.; identical to SEQ ID NO: 85

SEQ ID NO: 99 - protein, 337 aa, Arthrospira sp.; identical to SEQ ID NO: 85

SEQ ID NO: 100 - protein, 368 aa, Microcoleus sp.
MLNKRVPVLNPDGTPAMPTKASRARRWIRDGFARVVKNDLPVFCVQLVKEPSGKNCQDISLGIDPGSCFTGVAVQSKQETLIGLNLNLPKKQVQKRLTERAVLRRTRRGRRIKRNLSFKLRNHRQKRFNNRRQSKLPPSIRANKQLELRVVDELRRLYPICHAYVERLNQSNSPGFTVAAQGQTFLIKELENRVSVTLVKGWETEATREWLKLPKSKNKGEQTPAAHVSDAIAQAARHFIRYAANTHHKEQTGYQWKGIVQVTPFTFGIVERLPSRPRKMHDLTVGAGGVRDTYGGFDGTHSFKNGDYVEYKTKRSTLKGYISANDLYQFFPVKKRLKQGVTDRNTRLISYSSHLVVNLHGGLAFLSR

SEQ ID NO: 101 - protein, 349 aa, Calothrix sp.
MFVPVVDSNQRPLMPTTPSRARRWIKQKKATPFFRKGVFCVRLNVEPSNRNYQPIAIGVDPGSKREGFTVKSKAHTYLNVQTHAVDWVKDHVKTRRNMRSSRRFRNTPCRQNRKNRLRNKPRLTPSTKARWQWKLRICKWLTSMFRVTVFVVEDVKAKTWKGAKKWNKSFSPLEVGKNWFYSQLEQLARLETKTGNETYELRQSLGLKKSKNKLSNKFDAHCVDSWVLAFLYTEGHDKPDNTELIEVIPLEFHRRQLHRLQHQEGHIRPRYGGTISAGFKRGSIVKHKKYGFCYVGGWLESPTKKDPQRKTISLNSFATGKRLTQNALPSDCKFKAYSSWRIVTADKSA

SEQ ID NO: 102 - protein, 376 aa, Microcoleus sp.
MLRIPVVSPEGKPLMPTKPSRARRWIQDGLAVKKWSDLGVFYIQLINQPSGEKTQPIAIGIDPGKHYSGIGVQSSKVTLFMAHLVLPFQSIKDRMEQRRMMRRGRRGRRINRKAPYNQRAHRQKRFANRRGNKLPPSVRANRQLELRVATELCQIFPISQVVYEYIKADVDLTSGRKKARSGNGFSPVMVGQKWMLEHLSKLAPTSTLYGWETAAIRQQIGLVKEKKDKSNQSPETHAVDGISLASSQFIQYRQLKGKQGWWDGFVSITPAPFVVIRRPPVSRRQLHLMIPAKGGKRRKYGGTTTRHDFRKGDLVKAEMAGRVCVGWVSGDTQKQVSVSDLNWKRLGQFTASKVQLLCRATGLLVSPLRYCQLLGY

SEQ ID NO: 103 - protein, 369 aa, Aphanocapsa sp.
MNPNTRVPVLAPDGRPLMPTKYRRASQWVQHGKATWMSTDLNVYAVQLMGEPSGRKTQRISLGVDPGKRFTGIGLVSSKATLLKRHIALPFERVKARKETQKILRRARRGRRINRNLPFSERAHRQKRFSNRRGKKLPPSIRANKELEKRLIVEIFRLFPVTCVVWELVRADVDLTSGRKGARSGKGFSPVMVGQRQMLTWLRSFTTVYEMQGWQTKSTREYLGLAKSPDKKAQTPESHANDGLALAAAYFVRYVPTGTGRDWVGEIRLTSAPFRVVSRPQLYRRQLHFENPCKGGSRKRKGGTVTPWGFRSGDYVQSEKSGQLYRGWIGGYSEKNRVLSIYNHNWRRVGQFRVSKVSLIKRSNGLCVA

SEQ ID NO: 104 - protein, 389 aa, Oscillatoria sp.
MLDSVGEETITPIGGLSQTMLRVPVLSPDGKPLMPTQPSRARRWIRDGLAVGKWSDLGMFYVQRVEQTSGEETQPIAVGVDPGKLYSGIGVQSAKATLFMAHLILPFQTVKDRMEQRRMMRRNRRGRRINRQLEYSKRAHRQQRFDNRRRNKLPPSVRANRQFELRVVTELCRLFPVSKIVYESVKARGSKSFSPVMVGQKVMLGWLSKLAPIETQLGYQTASLRTQLGLVKSQDKSSKTPESHAVDGVTLACSEFIKYKPFQTAKTHGHTWKGSVQLTHAAFVVIRRPPISRRQLHLMVPSKGGVRRKYGGTMTRHGVRKGDLVRASMDRRVVMGWVSGDTARQVSVSNCDWKRLGQFTASKVQLIHRATGLLVSRLHYLLVNGPSIA

SEQ ID NO: 105 - protein, 408 aa, unidentified
  REGION 1..408: note = Ga0373628_0092043
MDASLVHTSTAESLNATDNRSILSSGYIGEGKFDMPDETIVEGIAEIGKNNTKERTRVPVVAADWTPLMPCTAAKAKRLLRGGKAGYSWNKLGMFFLKLDYVPREISLQPLVLGIDSGSRFEGYSVSGTDDNLANLMVETKDWVKKAVETRRNMRRARRFRNTRRRKCKANRMKGKHIAPSTRARAEARVEMARQLGKIIPFNTVVVEDIKAATRKNRSKKTRRWNANFSPLEVGKQHMYSKLRGLGYKVKLVSGFETRAIRDAIGIKKTSDKAKPVFESHCLDAWAIASPVSKAEYPSSRSIIYLVPLHFNRRQLHMLQFEKGGKRRRQGGTISNGIKRGTLVRNSKYGLCYVGGCSDNGVSLHSYETGKRLTQNGKIRDIKRNVAYRMSAIHPTNKCRGLPCRLGG

SEQ ID NO: 106 - protein, 343 aa, unidentified
  REGION 1..343: note = sediment metagenome
MYTLCKEAYRMFVPVVDRNQQPLMPTTPARARRWIKAGKATPFWKKGVFCVRLNVEPSDRKVQPIAVGIDPGSKKEGWSVKSAAHTYLNIQADAVTWVREHVEQRRNMRRSRRYRKTPCRQPRSNRARGGLPPSTKARWQWKLRLARWLVRLFPVTTFVVEDIQAKTKGQRRWDTSFSPLEVGKRWFREQLSKLGQVLTCSGWETKQMRDALTLKKTSKKTAEVFETHCVDAWVLANSVTGGHKLPDNKRMLFLVPLRFHRRQLHRLQPDKKGRRTPYGGTLSLGCKRGSLVRHRRWGLAFVGGSSGNKLSLHRLEDGKRLTQNARKADVRHLSFCSWRFYGW

SEQ ID NO: 107 - protein, 365 aa, Microcystis sp.
MARVPVISKDGKPLMPTKPSRARRWIKEGKAIGKFNDLGIFYVQLTTESSNNKTQPIAIGIDPGQLFSGIGVQSSLFTLWKAHLELPFKRVKERMDNRRLMRRGRRKRRINRQLSFNLRAHRQKRFSNRKQGKLAPSIRANRQLELRVVSELTKIYPITDIYFEYVKADVDLTSGRKGAKSGKGFSSVMVGQKWAIEQLSQLATVHTRFGWQTSNLRKYLGLEKSKNKAEQSPESHANDGIALACFQFLDYWPFHNSNSHGYDWKGSVKVTNAPFAVIKRPPISRRQLHLMVFSKGGKRRKYGGSTTRHGFRKGDLVSSPKGIGYISGDTEKQLSVSDTNGQRLGQIAVSKIQLIRRSNGLIVSR

SEQ ID NO: 108 - protein, 364 aa, Planktothrix sp.
MRIPVVDQNNKPLMPTTPARARKWIESGKAVKRYSDCGQFYVQLLVKPSGYTTQNIVIGIDPGKKFSGIGVQSAKFTLYTAHLILPFQTVRERMDARRLMRRGRRGRRINRKVEFSKRNHRQKRFNNRRQGKLAPSIRANRQLELRIVSELFKIYPVTEIRYEYVKADVDLTSGRKQAKSGKGFSPVMVGQKWMLTQLEKLAPVVKIEGDQTASTRKYLGLTKNKTDKSKPEFNTHAVDGVAIAATAFVEYRQYHTAKTDGVNWFGDVVITTAEFRVIRRPPFSRRQLHLMLPAKGGVRRKYGGSTTRHGFRKGDLVKSPKGVGYVSGDTERQVSVSDANWKRLGQIASSKVQLIRRSNGLIVT

SEQ ID NO: 109 - protein, 401 aa, Arthrospira sp.
MFDSVGEETQTRKRFITMLRVPVLSPSGKPLMPTKPSRARRWIRDGVAVGKWSDLGVFYVQLTQQPSGEETQPIAVGVDPGKLYSSVGVQSPKATLFLAHLVLPFPAVKDRMKQRRMMRRGRRGRRINRNWAYSQRAHRQKRFNNRRQNKLPPSIRANRQLELRVVTELCRLFPVSNIVYEYVKAKGSKSFSPVMVGQKVMLGWLSKLAEVKTQFGYETANLRTALRLVKSKDKSDQTPETHAVDGLTLACSELVKYEPFHTANTHGHTWKGLVQLTPSIFKVIRRPPISRRQLHLMVPAKGGVRRKYGGTTTRHGVRKGDIVRAEMAGRVIVGWVSGDTHRQVSVSDLNWKRLGQFTASKVSLIARSTNLVVSGALNPTQPPLLSLPHLLREDGGFSENF

SEQ ID NO: 110 - protein, 401 aa, Arthrospira sp.; identical to SEQ ID NO: 7

SEQ ID NO: 111 - protein, 365 aa, Microcystis sp.
MERVPVISKDGKPLMPTKPSRARRWIKEGKAIGKFNDLDIFYVQLTTEPSDNKTQPIAIGIDPGKLFSGIGVQSSLFTLWKAHLELPFKRVKECLDNRRLMRRGRRGRRINRQLPFNLRAHRKKRFSNRKQGNELPSIRANRQLELRVVSELTKIYPITDIYFEYIKADIALTSGRKGAKSGKGFSSVMVGQKWAIEQLSQLATVHTRFGWQTSNLRKYWRLEKSKNKAEQSPESHANDGIALACFQFLDYCPFHNSNGHGYDWKGSVKVTNAPFAVIKRPPISRRQLHLMVFSKGGKRRKYGGSTTRHGFRKGDLVSSPKGIGYVSGDTEKQLSVSDTNGQRLGQMAVSKIQLIRRSNGLIVSH

SEQ ID NO: 112 - protein, 365 aa, Planktothrix sp.
MQRVPVISSNNQPLMPTKSSRARRWIKEGKAIGKFNDLGQFYVQLKVEPLDDKTQPITVGIDPGKLYSGIGVQSANFTLWTGHLELPFKKVRERMDNRRMMRHGRRGRRINRNIPFNQRAHRQVRFSNRRQGKLPPSIRANRQLELRVVKELFKMFPITDIYFEYVKADVDLTSGRKGAKSGKGFSAVMVGQKQMVNWLSQLATVHTIYGWQTSNLRKYLKLEKSKDKSEQTVKSHAVDGITLACYYFLEYKAHFSSNTHGHSWQGNVTITSCPFAVIKRPPISRRQLHLMVPSKGNIRRKYGGTTTEFGLRKGDLVNSPKGIGYVSGQTKKQISVSDANWKRLGQIAFSKITLIRRSNGLIITC

SEQ ID NO: 113 - protein, 364 aa, Planktothrix sp.; identical to SEQ ID NO: 41

SEQ ID NO: 114 - protein, 342 aa, unidentified
  REGION 1..342: note = Ga0315279_10002905
MVPVFDSKNKPLMPCTEKRARKLLEKKQAFCFWKKGIFCIKLLREPSDRQYQDVVVGIDVGSKREAYTVTTVKHVVLNILTNTPDWVKDAVKSRREMRRGRRFRKTPCRQNRTNRAIMELSLGMLAPSTKARWQTKLRILNWLSTLYPITDVVVEDVKAKTRKTGAYAGSKKWNMSFSPLEVGKTWLYSEIKKFWNLYLVQGYETKEWRDMAKYKKSSNKLKDCWESHNVDSHVLCEIGLGGCIKPFKKILRLEFLHLHRRQLHVLQFAKGGIRKLYGGTRSMGFKRGSWVNHIKHGLCYIGGTSKERVSLHEMSTGKRLTQTAKPEDCRFLTYATWRMSFI

SEQ ID NO: 115 - protein, 365 aa, Microcystis sp.
MARVPVISKDGKPLMPTKPSRARRWIREGKAIGKFNDLDIFYVQLTDEPSDNKTQPIAIGIDPGKLFSGIGVQSSLFTLWKAHLELPFKRVRERMDNRRLMRRGRRKRRINRQLSFNLRAHRQKRFSNRKQGKLAPSIRANRQLELRVVSELTKIYPITDIYFEYVKADVDLTSGRKGAKSGKGFSSVMVGQKWAIEQLSQLATVHTRFGWQTSNLRKYLGLEKSKNKAEQSPESHANDGIALACFQFLDYLPFHNSNSHGYDWKGYVKVTNAPFAVIKRPPISRRQLHLMVFSKGGKRRKYGGSTTRHGFRKGDLVSSPKGIGYVSGDTEKQLSVSDANGQRLGQIAVSKIQLIRRSNGLIVSH

SEQ ID NO: 116 - protein, 339 aa, unidentified
  REGION 1..339: note = Ga0315284_10001184
MVPVFDQDNKPLMPCTEKRARKLLEKKQAFSFWKKGVFCIKLLREPSDRQFQDVVVGIDPGSKREAYTVSTAKYVVINILTNTPDWVKDAVKQRRIMRRSRRNRKTPCRKPRYNRARGSLGPSTRARWGAKLRILNWLSKLYPVTDIIVEDIKARTHKGSRKWNGSFSPLEVGKGWFYNNIRVRWNLSTVQGYETKEWRDAAGYKKTTSKLKECWEAHNVDSHVLCEIGLGYYITPYRNYLKIEFIRLRRRQLHMLQPSVGGNRRSNGGTRSMGLKRGSWVMHSKYGLCYVGGTSNNRISLHEMPIGKRLTQNAKPEDCRILTYSTWRVSSIRESSHCE

SEQ ID NO: 117 - protein, 424 aa, Chroococcidiopsis sp.
MARHLGLGGRRDIKLYSEDYLLNRVPVVSAEGKPLMPTKPSKARKLVRDGKAIGKWNKLNQYYIQIKFTPSGEETQPISCGIDPGKHYGSVGIQSSKVTLFTSHIFLPFETVKKRMEQRALMRRNRRGRRINRKLPYELRAHRQKRFSNRKQGHRPHGGQLEFNSSFRGGKLPPSIRANCQLLFRVTTELAKVYPISSIVYEYCKADVDLTSGRKRARSGKGFSPVMVGQKWILEQLSSIATVTKKLGWQTSNLRKHLGLKKQKQSKGDITPATHAVDAVTLASFTFTDYLPFENDKGRGHCWKGKVAITDAPFYVIRRPPISRRQLHLMVFAKDGKRRKYGGTVTRHGIRKGDLVITERKGTEYIGWCSGDTKSQISVSDSNWKRLGQFSNNKTRLLKRSTGLICKQLIGGRHFLPTLTANAV

SEQ ID NO: 118 - protein, 381 aa, Nostoc sp.
VDLNFTQGLYPVRVPVISRENISLMPTLPSRARRWIEQGKAIGKFNKLGIFYVQLIAEPCDTQTQEIVIGLDPGKMFSGVAVQSKKYTLQMLHLVLPFKTVKDRMLQRAMTRRSRRGRRINRKIPYNQRSHRQARFDNRRGSKLPPSIRANKDLEYRTIKLLCEIYPVKTIVVEVVEARGSKSFSPVMVGQRYQIKRLSELANVELKKGWETSNLRKYLGLHKEKSDKSLQIPETHAVDAVTLASSQFLKYESWSGVKNHGASWVGTVTITNSQFTIVRRPPISRRQLHLMVPPKGGNRRKYGGTTTRHGFRKGDFVEATQGNKTFFGWVSGDTEKQVSVSDASWKRLGQCTAKKVRLIKRNTGLIVLSTRRLSNLQASSL

SEQ ID NO: 119 - protein, 365 aa, Scytonema sp.
MQRVPVLDKDGKPLMPTKSSRARRWLKEGKAKIVHNDLNVFCVQLLVESSGTDTQLIAFGLDPGKKFTGVGVQSARFTLFMAHLILPFPEVTKKMSVRRVLRRARRGRRINRKVAFHQRAHRQKRLNNRRQKKLPPSIRANIELELRVTKELVKLFPISQITYEYIKAKGDKGFSPVMSGQKVMLEWLNQIAPTNTQEGWQTSILRQELGLAKDKKNKEKQTPETHAHDGIALAASNFISFSKFHTANSHGHRWLGEVIVTKAPFRIISRLRVFRRQLHFENPVKDAPNNRKRKGGTVTPFGFRSGDLVKAQKADKTYIGWIGGFTQTAKTKNVSVYDHNWHRIGQFSLSKIQLIKRSTRLCVAV

SEQ ID NO: 120 - protein, 406 aa, unidentified
  REGION 1..406: note = sediment metagenome
MDTLIPMPVSLPRRVIPPRPRPGERQSFMRIPVLDTRGVALMPCTPAKARHLFKSGKARPKRNKLGLFCVQLCYEQEPDNQPLVVGVDPGSMFEGLSVVGTKETVLNLMLEAPDHVKDAVETRRTMRRARRHRKWRRPKRFANRLNRKQRIPPSTRSRWEAKARVIMQLQKSIPLTAVVVEDVQAVTRPGKGGKWNSAFSPVQVGKEHLYRLLREMGLEVHLREGWQTKELREKYGLKKTKSKSKQCFESHAVDAFVLAASISGAEKPTCTRLWYLVPVVLHRRQLHRLQASSGGVRKPYGGTRSLGLKRGTVVRHATYGLCTVGGFDRKRHTISLHAYCTNKRLTQGATVKDCRPLTWVAFRSWFIAKAFPKSKGKGGHPAQAAVQGTLLSSPCLQDQGYPEAEV

SEQ ID NO: 121 - protein, 374 aa, unidentified
  REGION 1..374: note = Leptolyngbyaceae cyanobacterium CCMR0082
MQRIPVQNPDGTPAMPTKLARAKKWVEHGKAKWVKTDLRIKAVRLVSEPSGRDTQPIAVGIDPGKMFSGIGVQSAKATLFTAHLLLPFKRVKDRMESRAMMRRNRRGRRINRKLPFELRNHRQERFDNRKQKKVPPSIRANRQLELRVVTELCQLFPISKIVFEYVRARTKEGCSFSPVMVGQKWMIAQLEKLAPVRTLYGWQSASMRDHLGLSKSKDKSEQSPQSHAVDGVALAASEFVGYLKYHRNNSRGADWFGAVNVTSAQFVVIQRPPVSRRQLHLMVPAKGGNRRKYGGTVTRHGFRKGDLVIAEKKGIQSIGWVSGDTKNQVSVSDFNWRRIAQFTASKVQLLYRSTGLLVNCPQRLSVVGASSAVV

SEQ ID NO: 122 - protein, 300 aa, Planktothrix sp.
MRIPVVDQNNKPLMPTTPARARKWIESGKAVKRWSDCGQFYVQLTIEPSGYTTQNLVIGIDPGKKFSGIGVQSAKFTLYTAHLILPFQTVRERMDIRRLMRRGRRGRRINRKIEFSKRNHRQKRFNNRRQGKLPPSIRANRQLELRIVSELFRIYPVAEIRSEYVKADVDLTSGRKQAKSGKGFSPPPKPPVHGGLGGVGQKWMLSQLEKFAPVVRIEGYQTASTRKYLGLTKNKTDKSKPEFNTHAVDGVAIAATAFVEYRQYHTAKTDGANWFGDVVITTAQFRVIRKPPFSRRQLHL

SEQ ID NO: 123 - protein, 364 aa, Anabaena sp.
MRVPVVDQNHQPLMPTTPARARKWIASGKAVKRWSDGGQFYVQLTGEPSGRATQDIVIGIDPGKKFSGIGVQGAKLTLYTAHLILPFQTVRNRMDARRLMRRSRRSRRVNHKVVFSKRAHRQKRFDNCRQGKLAPSIRANRQLELRIVSELCKIYPVSEIRYEYVRADVDLTSGRKKAKSGKDFSPVMVGQKWMLSQLEQFAPVVKVEGYQTASIRKHLGLTKNKVDKSKPEFNTHAVDGVAIAATAFVEYRQYHTTKIDGADWFGDVVITPAVFTCVRRPPLSRRQLHLMLPAKGGVRRQYGGSTTRHGLRKGDLVHSPKGIGYVSGDTEKQISVSDANWKRLGQIASSKVQLIRRSNGLIVA

SEQ ID NO: 124 - protein, 364 aa, Planktothrix sp.; identical to SEQ ID NO: 41

SEQ ID NO: 125 - protein, 329 aa, Moorea sp.; identical to SEQ ID NO: 57

SEQ ID NO: 126 - protein, 371 aa, Anabaena sp.
MRVPVISVDNTPLMPTKPSRARRWIKDGKAIGKFDKLGIFYVQLLAEPSNTETQEIVIGLDPGKLFSGIAVQSKKFTLQMLHLVLPFKTVKDRMEQRSMMRRNRRGRRINRKLSFNVRNHRQARLDNRRGSKLPPSIRANKDLEYRVISLLLQLYPIKTIVIEEVEARGNKGFSPVMVGQRYQISRLSKLTNVVLKKGWETSNLRKHLGLHKEKSDKSLQIPETHAVDAVTLACSEFVKYQTWKGAKNHGASWVGGVDVTESQFTIVRRPPISRRQLHLMTFSKGGNRRKYGGSTTRHGFRKGDFVEASQGNKTFFGWVSGDTEKQVSVSDANWKRLGQCTVKKVKLIRRSTGLITTAVKTARVASLSALK

SEQ ID NO: 127 - protein, 317 aa, Planktothrix sp.
MQRVPVISSNNQPLMPTKSSRARRWIKEGKAIGKFNDLGQFYVQLKVEPLDDKIQPIAVGIDPGKLYSGIGVQSANFTLWTGHLELPFKKVRERMDNRRMMRHGRRGRRINRNIPFNQRAHRQVRFSNRRQGKLSPSIRANRQLELRVVKELFKMFPITDIYFEYVKADVDLTSGRKGAKSGKGFSAVMVGQKHMVNWLSQLATVHTIYGWQTSNLRKYLKLEKSKDKSEQTVKSHAVDGITLACYYFLEYKAHFSSNTHGHSWQGNVTITSCPFAVIKRPPISRRQLHLMVPSQGNVRRKYGGTTTEFGLRKGDAR

SEQ ID NO: 128 - protein, 354 aa, Ktedonobacter sp.
MRIPVVDTRGIALMPCTPAKARHLLKSGNARPKRNKLGLFYVQLSYEQEPENQSLVAGVDPGSKFEGLSVVGTKDTVLNLMVEAPDHVKGAVETRRTMRRARRQRKWRRPKRFHNRLNRKQRLPPSTRSRWEAKARIIAQLRNILPLTDVVVEDVQAVTRKGKGGTWNGSFSPVQVGKNHLYQLLREMGLTVHLREGWQTKELREQHGLKKTKSKAKQSFESHAVDSWVLAASISGAEHPTCTRLWYMVPAVLHRRQLHRLQASEGGGRKPYGGTRSLGVKRGTLVEHKKYGRCTVGGCDRKRNTISLHEYRTNTRLTQAAKVEACRIFTWVAWRSWLIRGTHTSSKGKGSHPS

SEQ ID NO: 129 - protein, 401 aa, Arthrospira sp.
MFDSVGEETQTRKRFITMLRVPVLSPSGKPLMPTKPSRARRWIRDGVALGKWSDLGVFYVQLTQQPSGEETQTIAVGVDPGKLYSGVGVQSPKATLFLAHLVLPFPVVKDRMKQRRMMRRGRRGRRINRNWAYSKRAHRQKRFNNRRQNKLPPSIRANRQLELRVVTELCRLFPVSKIVYEYVKAKGSKSFSPVMVGQKVMLGWLSKLAQVKTQFGYETANLRTELRLVKSKDKSAQTPETHAVDGLTLACSELVKYEPFHTANTHGHTWKGLVQLTPSIFKVIRRPPISRRQLHLMVPAKGGVRRKYGGTTTRHGVRKGDIVRAEMAGRVVVGWVSGDTHRQVSVSDINWKRLGQFTASKVSLIARSTNLVVSGALNPTQPPLLSLPHLLREDGGFSENF

SEQ ID NO: 130 - protein, 317 aa, Planktothrix sp.; identical to SEQ ID NO: 127

SEQ ID NO: 131 - protein, 382 aa, Pleurocapsa sp.
MQKQPTIRVPVLSPLGKKLMPTTSARARKWITAGKAKPVWNDLNIFCVQLLVEPSGTETQEIVVSIDPGKLFSGVAAASKKAVLFTAHLVLPFKRVIARKQAQKLLRRARRGRRINRNIPFAQRAHHQKRFNNRRGNKLPPSIRANRQLELRVVKELVKLFPVTSIVYEYVKAKGNKGFSPVMVGQVWMLEQLSNIARQSVAGVPPVKGTVEGASTHNLEGWKTSILRKQLGLEKNKDDKSVQDVTTHANDAIALCASRFMQYKAFHTANSHGRHWVGSIQLTDAPFKVIARPQLYRRQLHFENPSKGGNRKRKGGTVTLFGFRSGDLVVATKGKKTVKGYIGGYSEVNKVVSIYDHNWKRYGQFSISKTNLLRRSNGLCVA

SEQ ID NO: 132 - protein, 401 aa, Arthrospira sp.
MFDSVGEETQTRKRFITMLRVPVLSPSGKPLMPTKPSRARRWIRDGVALGKWSDLGVFYVQLTQQPSGEETQTIAVGVDPGKLYSGVGVQSPKATLFLAHLVLPFPVVKDRMKQRRMMRRGRRGRRINRNWAYSKRAHRQKRFNNRRQNKLPPSIRANRQLELRVVTELCRLFPVSNIVYEYVKAKGSKSFSPVMVGQKVMLGWLSKLAQVKTQFGYETANLRTALRLVKSKDKSAQTPETHAVDGLTLACSELVKYEPFHTANTHGHTWKGLVQLTPSIFKVIRRPPISRRQLHLMVPAKGGVRRKYGGTTTRHGVRKGDIVRAEMAGRVIVGWVSGDTHRQVSVSDLNWKRLGQFTASKVSLIARSTNLVVSGALNPTQPPLLSLPHLLREDGGFSENF

SEQ ID NO: 133 - protein, 365 aa, Microcystis sp.
MARVPVISKDGKPLMPTKPSRARRWIKEGKAIGKFNDLDIFYVQLTDEPSDNKTQPIAIGIDPGKLFSGIGVQSSLFTLWKAHLELPFKRVKERMDNRCLMRRGRRGRRINRQLPFNLRAHRQKRFLNRRQGKLAPSIRANRQLELRVVSELTKIYPITDIYFEYIKADVDLTSGRKGAKSGKGFSPVMVGQKWAIEQLSQLATVHTRFGWQTSNLRKHLRLEKSKNKAEQSPESHANDGIALACFQFLDYLPFHTSNGHGYDWKGSVKVTNAPFAVIKRPPISRRQLHLMVFSKGGKRRKYGGSTTRHGFRKGDLVSSPKGIGYVSGDTEKQLSVSDTNGQRLGQIAVSKIQLIRRSNGLIVSH

SEQ ID NO: 134 - protein, 364 aa, Calothrix sp.
MRVPVVDKDHQQLMPTTPARARKWVESGKATKHWSDCGQFYVQLTSEPSGRATQDIVIGVDPGKKFSGIGVQSAKFTLYAAHLILPWLAVRDRMDARRLMRRGRRGRRIKRKVDFSKRAHRQKRFDNRRQGKLPPSIRANRQLELRVVSELCKIYPVSSIRYEYVRADVDLTSGRKKAKSGKGFSAVMVGQKWMLKQLEQFAPVAKVEGYQTASTRKYLGLTKNKVDKSQPEFNTHAVDGVAIASSHFVEYRQCHTTKVDGGNWFGSVTITPAPLKVIRRPPYSRRQLHLMLPAKRGMRRKYGGSTTRHGLRKGDLVKSPKGVGYVSGDTETQISVSDAGWKRLGQIFSKKISLIRRSNGLIVA

SEQ ID NO: 135 - protein, 364 aa, Nodularia sp.; identical to SEQ ID NO: 93

SEQ ID NO: 136 - protein, 172 aa, unidentified
  REGION 1..172: note = Oscillatoriales cyanobacterium
MFVPVVSSENRPLMPTTSSRAKRWVKSGKATPFWRKGVFCVRLNAEPTDRNCQPIAVGIDPGSKREGFTVKSKSHTYLNVQTHAVDWVKDRIEVRRNMRRARRFRKTPCRQNRKNRLVNKTRLAPSTKARWQWKLRIVNWLTKMFPITVFVVEDIQARTWKTDASGMYLLVL

SEQ ID NO: 137 - protein, 410 aa, Spirulina sp.
VGSAQKHRTHWLKRPIVLELSSMQRIPVQNPDGTPAMPTKSSRAQKWVAQGRATWVKTNLRIKAVRLKAEPSGRNTQPIVVGVDPGKLYSGIAVQSAQATLFQSHLELPYPRVRERMDHRRMLRRSRRSRRINRELPFQLRNHRQKRFNNRRKKKVAPSIRANRDLEFRVVQELSQLFPIATIGYEKVRADVDLTSGRKGAKSGKGFSPVMVGQAYAIEKMEQIAPVYTRYGWQQDGNGTAQLRSTLGLKKSQDKAEQIPQTHAVDGIALACGYFIGYRPFHRKRSHGYLWFGEVKLTSAPFVVIKRPPISRRQLHLMVPRKKGLRRKYGGTVTRHGFRKGDLVRAEMAGRVSVGYVSGDTTRQVSVSEFTWKRIGQFSAAKVELLYRATGILVSCPQRLSVSGAFNPAA

SEQ ID NO: 138 - protein, 371 aa, Mastigocladopsis sp.
MRIPVISKGGKPLMPTTPSRARRWIKDSKAIKKWSKLGVFYVQLTVEPSNTKTQPIVIGLDPGKLYSGVGVQSSRFTLLMLHLVLPFKTVKDRMEQRAMMRRGRRGRRINRKLPYIQRAHRQARFDNRKQKKVPPSIRANKTLELRVLSEIVKLYPVQGIIVERVMARGDKGFSPVMVGQLWLRKQVEKQFSIEPSTIQGWETSNLRKQLGLPKDKQDKSRQTPETHAVDGVTIAASRWVKYGITSINGMGWKGQINITPSQFVIVKRPPVSSRQLHLMVPAKGGVRRKYGGTVTRHGFRKGDYVEATQGAKTFCGWVSGDTEKQVSVSDASWKRLGQFTAKKVRLIQRSTGLIVLSTRRLSNLLPLKESV

SEQ ID NO: 139 - protein, 365 aa, Microcystis sp.
MARVPVISKDGKSLMPTKPSRARRWIKEGKAIGKFNDLGIFYVQLIDEPSDSKTQPIAIGIDPGQLFSGIGVQSSLFTLWKAHLELPFKRVKERMDNRRLMRRGRRKRRINRQLSFNLRAHRQQRFSNRKQGKLAPSIRANRQLELRVVSELTKIYPITDIYFEYVKADVDLTSGRKGAKSGKGFSSVMVGQKWAIEQLSQLATVHTRFGWQTSNLRKYLGLEKSKNKAEQSPESHANDGIALACFQFLDYWPFHNYNGHGYDWKGSVKVTNAPFAVIKRPPISRRQLHLMVFSKGGKRRKYGGSTTRHGFRKGDLVSSPKGIGYISGDTEKQLSVSDTNGQRLGQIAVSKIQLIRRSNGLIVSR

SEQ ID NO: 140 - protein, 326 aa, Fischerella sp.
MNSNARIPVLSPDGKPLMPTLYRRAQVWVEQGKAKWIGNDLNIKQVHLLQEPSGNATQPVAIGIDPGKKFSGIAVQSSQFTLFAAHLVLPFPNVTKKMTGRRILRRARRSRRINRKIPFHLRAHRQKRFDNRRHKKLVPSIRANREFELRVVKELMRLFPVSTIVYEYIEAKGDKAFSPVMVGQKVMLEFLTELAPVATCFGWQTANLRTHLNLIKHKNKASQSPQSHGVDGIALASSQFVNYEAFQTKREHGRRWVGSVRLTPSPFRVITRPNLFRRQLHFENFRQGAVRKRKGGTVTPFGFRSGDFVQGEKAGKIHRGWIGGFK

SEQ ID NO: 141 - protein, 366 aa, Tolypothrix sp.
MLRVPVLSKWGLPLMPTKPSRARRWLKSGKARIVHNDLGIFQIQLIKLTGEETQPVAVGVDPGKLYTGIGVQSAKFTLWLAHLQLPFKTVKDRMEQRAMMRRTRRGRRINRKVAFNKRAHRQKRFDNRRGCKIPPSIRANRELEWRVLDELTVIFPIETVVYEIIKARGDKGFSPVMVGQKWQLEQLTAFGEVKQLQGWETAQIRTQLGLEKQKHSKGDAIPATHAIDGVALACSEFIQYGIIDRHSRGWKGEVTITPAPFAVIRRPPMSRRQLHLMVPAKGGVRRKYGGTVTRHGFRKGDYVEATQGNKTYRGWVSGDTEKQISVSDANWKRLGQFSKNKVQLIRRSSGLILTVVKTTVGVSSTV

SEQ ID NO: 142 - protein, 410 aa, Spirulina sp.
VGSAQKHRTHWLKRPVVLELSSMQRIPVQNPDGTPAMPTKSSRAQRWVAQGKAQWVKTNLRIKAVRLKAEPSGRNTQPIVVGVDPGKLYSGIAVQSAQATLFQSHLELPYPRVRERMDHRRMLRRSRRSRRINRELPFQLRNHRQKRFNNRKQQKVPPSIRANRDLEFRVVQELSQLFPIATIGYEKVRADVDLTSGRKGAKSGKGFSPVMVGQAYAIEKMEQIAPVYTRYGWQQDGNGTAQLRSTLGLKKSQDKAEQIPQTHAVDGIALACGYFIEYRPFHRKRSHGYLWFGEVKLTSAPFVVIKRPPISRRQLHLMVPRQKGLRRKYGGTVTRHGFRKGDLVRAEMAGRVSVGYVSGDTTRQVSVSEFTWKRIGQFSAAKVEPLYRATGILVSCPQRLSVSGAFNPAA

SEQ ID NO: 143 - protein, 368 aa, Microcoleus sp.
MIRVPVLSPKGKPLMPAKASRVRRWLKSGKAKVIHNDLGIFQVQLVEEPSGEETQNIVAGIDPGKLFTGVAVQSRGATLFLAHLNLPFKNVTKRMQGRAMMRRGRRGRRINRKLPFNQRNHRQHRFDNRKGHKIPPSIRANKQLALRVIQELSKIYPFTDVVVEVIKARGDKGFSPAMVGQHWQIEQLEQAGYTVHTQEGWHTSNLRKYLGLPKSKNKAESSPAAHAVDGICLAASQFMRYRQIKGRSGTWLGAVEMTPCQFAVICRPPICRRQLHLMVPPKGGKRRSYGGTVTRHGFRKGDYVRSEKAGITYCGYVSGDTKTQVSVSDANWKRLGRFTAKKVQLLQRNTGLVSTVGLSNLTASSGAV

SEQ ID NO: 144 - protein, 365 aa, Cyanothece sp.
MERVPVISKEGKPLMPTKSSRARKWIKDGKAVGKFNDLNQFYVQLAVEPSDSKIQLISIGIDPGKLFSGIGVQSSSYSLWTGHLELPFKTVKKRMEDRRMMRRARRGRRINRNLPFELRAHREKRFNNRKQGKLPPSIRANRQLELRVIKELCKVFPITDIYFEYVKVDVDLTSGRKKARSGKGFSPVMVGQKWMLEQLRQLANVHTRYGWQTSNLRQHLGLEKSKDKAKQSKESHANDGLTLACFQFLDYKSFQTVNSQGHHWVGSVAITSCPFAVIKRPPFSRRQLHLMLPSQGGLRRKYGGTTTDFDLIKGDLVDSPKGIGYVSGQTKKQISVSDANWKRLGQIAFSKVTLIRRSTGLIVSY

SEQ ID NO: 145 - protein, 361 aa, Thermanaeromonas sp.
VEYGVSQNEISKACALYFSERIPVVSRDGRPLMPCRPAKARKLLSSGKAEPRWSKLGLFYIQLGIDIKSEYNGGGQSFVLAHDPGSKFDGMALGCKFVQLRFMVILPQKVAGKMKNRRELRRGRRYRNCRRRPYRPRSPGPYWIAPTQLAKVLFRLAVVEELCRLFPISHFIVEDVRFNHFRFRHGKHFSTAEIGKTRYYSELCRLGVLVLVEGWQTKLWREGAGLKKVTRKDALIPGSHANDAVAMLWGLAGCGVNEGAPFYVLRRPEFARRSLHRQNFQKGCVRSLFGGTSNGSFLRKGDYVEAEKAGKVYRGWVCGLPTETTPLVGVMDARGVRIGQFAPGKVRLLQRGHNILWERVM

SEQ ID NO: 146 - protein, 374 aa, unidentified; identical to SEQ ID NO: 121
  REGION 1..374: note = Leptolyngbyaceae cyanobacterium CCMR0082

SEQ ID NO: 147 - protein, 369 aa, Planktothrix sp.
MGYTKMRIPVVDQNNKPLMPTTPARARKWIESAKAVKRWSDCGQFYLQLTVEPSGYTTQNLVIGIDPGKKFSGIGVQSAKFTLYTAHLILPFQTVRERMDTRRLMRRGRRGRRINRKVEFSKRNHRQKRFSNRRQGKLAPSIRANRQLELRIVSELFKIYPVAEIRYEYVKADIDLTSGRKQAKSGKGFSPVMVGQKWMCNQLEKFAPVVKIEGYRTSVTRKYLGLTKNKTDKSKAEFNTHAVDGVAIAATAFVEYRQYHTAKTDGANWFGNVVITTAQFRVIRRPPFSRRQLHLMLPAKGGMRRKYGGSTTRHGFRKGDLVKSPKGVGYVSGDTERQVSVSDANWKRLGQITYSKVQLIRRSNGLIVT

SEQ ID NO: 148 - protein, 368 aa, Microcystis sp.
MERVPVISKEGKPLMPTKPSRARRWIKEGKAIGKFNDLGIFYVQLTTEPSDNKTQPIAIGIDPGKLFSGIGVQSPLFTLWKAHLELPFKRVRECLDNRRLMRRGRRGRRINRQLPFNLRAHRQKRFSNRTNSKLAPSIKTNRQLELRVVSELTKIYPITDIYFEYIKADIALTSRRKGAKSGKGFSPVMVGQKWAIEQLSQLATVHTRFGWQTSNLRKHLRLEKSKNKAEQSPESHANDGIALACFQFLDYWPFHTSNGHGYDWKGSVEVTNAPFAVIKRPPISRRQLHLMVFSKGGKRRKYGGSTTRHGFRKGDLVSSPKGIGYVSGDTEKQLSVSDTNGQRLGQMAVSKIQLIRRSNGLIVSHQLI

SEQ ID NO: 149 - protein, 390 aa, unidentified; identical to SEQ ID NO: 4
  REGION 1..390: note = Ga0373625_0039173

SEQ ID NO: 150 - protein, 364 aa, Planktothrix sp.; identical to SEQ ID NO: 41

SEQ ID NO: 151 - protein, 314 aa, Moorea sp.; identical to SEQ ID NO: 58

SEQ ID NO: 152 - protein, 365 aa, Microcystis sp.
MARVPVISKDGKSLMPTKPSRARRWIKEGKAIGKFNDLGIFYVQLIDEPSDTKTQPIAIGIDPGKLFSGIGVQSSLFTLWKAHLELPFKRVKERLDNRRLMRRGRRKRRINRQLSFNLRAHRQKRFSNRKQGKLAPSIRANRQLELRVVSELTKIYPITDIYFEYVKADVDLTSGRKGAKSGKGFSSVMVGQKWAIEQLSQLATVHTRFGWQTSNLRKYLGLEKSKNKAEQSPESHANDGIALACFQFLDYWPFHNYNGHGYDWKGSVKVTNAPFAVIKRPPISRRQLHLMVFSKGGKRRKYGGSTTGHGFRKGDLVSSPKGIGYVSGDTEKQLSVSDTNGQRLGQIAVSKIQLIRRSNGLIVSH

SEQ ID NO: 153 - protein, 297 aa, Spirulina sp.
VNGWIIAECYGVLAAVGGLIESYPSSYEIIAKSDLPPETRQKVPPSIRANRDLEFRVVQELSQLFPIATIGYEKVRADVDLTSGRKGAKSGQGFSPVMVGQAYAIEKMEQIAPVYTRYGWQQDGNGTAQLRSTLGLKKSQDKAEQIPQTHAVDGIALACGYFIEYRPFHRKRSHGYLWFGEVKLTSAPFVVIKRPPISRRQLHLMVPRKKGLRRKYGGTVTRHGFRKGDLVRAEMAGRVSVGYVSGDTTRQVSVSEFTGKRIGQFSAAKVELLYRATGILVSCPQRLSVSGAFNPAA

SEQ ID NO: 154 - protein, 365 aa, Microcystis sp.
MARVPVISKDGKPLMPTKPSRARRWIKEGKAIGKFNDLGIFYVQLTDEPSDNKTQPIAIGIDPGKLFSGIGVQSSLFTLWKAHLELPFKRVKERMDNRCLMRRGRRGRRINRQLPFNLRAHRQKRFSNRRTGKLAPSIRANRQLELRVVSELTKIYPITDIYFEYIKADIDLTSSRKGAKSGKGFSPVMVGQKWAIEQLSQFATVHTRFGWETSNLRKHLRLEKSKNKAEQSPESHANDGIALACFQFLNYLPFHTSNGHGYDWKGSVKVTNAPFAVIKRPPVSRRQLHLMVFSKGGKRRKYGGSTTRHGFRKGDLVSSPKGIGYVSGDTEKQLSVSDTNGQRLGQIAVSKIQLIRRSNGLIVSH

SEQ ID NO: 155 - protein, 373 aa, Cyanothece sp.
MLRVPVISKEGKPLMPTKPSRARKWIKDGKAVGKFNDLNQFYVQLIVNSSDNKTQTISIGIDPGKLFSGIGVQSSSYSLWAGHLELPFKTIKKRMEDRRMMRRTRRGRRINRHLPFELRAHRQKRFNNRKQGKLPGVRNEFRTPSIRANRQLELRVVKELCKVFPITDIYFEYVKADVDLTSGRKKACSGKGFSPVMVGQKWMLEQLRQLGNVDTRYGWQTSNLRQHLGLEKSKDKAKQSKESHGLDGLTLACFQFLDYKSFQTVNSQGHHWVGSVTITNCPFAVIKRPPFSRRQLHLMLKSKGGIRRQYGGTITDFDLRKGDLVNCPKGIDYVSGQTKKQISVSDANWKRLGQIAVSKVTLIRRSNGLIVNC

SEQ ID NO: 156 - protein, 371 aa, Dolichospermum sp.
MRVPVISVDNTPLMPTKPSRARRWIKCGKAIGKFDKLGIFYVQLLAESSNTETQEIVLGLDPGKLFSGIAVQSKKFTLQMLHLVLPFKTVKDRMDQRSMMRRNRRGRRINRKLSFNKRNHRQARFDNRRGSKLPPSIRANKDLEYRVISLLLQLYPIKTVVIEEVEARGNKGFSPVMVGQRYQISRLSKLTNVVLKKGWETSNLRKYLGLHKEKSDKSLQIPETHAVDAVALASSEFVKYQTWEGAKNHGASWIGGVDITESQFTIVRRPPISRRQLHLMTFSEGGNRRKYGGTTTRHGFRKGDFVEATQGSKTFFGWVSGDTEKAVSVSDANWKRLGQCTVKKVKLILRSTSLIITAVKTARVASLSALK

SEQ ID NO: 157 - protein, 365 aa, Cyanothece sp.
MLRVPVIAPDKTPLMPTKCSRARRWIKEGKAIGKFNDLGQFYVQLIEQPSDNKTQPITIGIDPGKLFSGIGVQSSHFSLWKAHLELPFKRVRERMDNRRLMRRSRRGRRINGKISFESRAHRQKRFSNRRQGKLSPSIKANRQLELRVVSELSKIYPITDIYFEYVKADVDLTSGRKKARAGKGFSAVMVGQKWMLEQLKQFGDVHTRLGWQTSNLRKHLGLEKSKDKAKRSPESHANDGITLACFRFLDYREFHTHNSRGHDWIGKVQLTPSPFAVVKRPPISRRQLHLMLPSKGGIRRKYGGTTTDFDLRKGDLVNSPKGIGYVSGQTKKQISVSDANWKRLGQIAVSKVTLIKRSNGLIVTA

SEQ ID NO: 158 - protein, 371 aa, Mastigocladopsis sp.; identical to SEQ ID NO: 138

SEQ ID NO: 159 - protein, 390 aa, Tolypothrix sp.
MFVPVVDQNNRPLMPTTPSRAKRWIKSGKATPFFKKGVFCVRLNQEPSNRNTQPIAVGIEERRKREGFTVKSKMHTYLNIQTHAVDWVKDHVEVRRNMRRARRFRNTPCRQNRKNRLVNKQKLPSGFGSSLSTGTAKTATASPPSTKARWQWKLRICKWLALIFPVSTFVIEDIKAKTWKNGRKWNLIFSPLEVGKKWFYSELKRLANLETRTGNDTYAGRQSLGLKKSKNKLSNSFSAHCVDSWVLANWFVSGHTKPENTELIEIIPLEFHRRQLHRLQHSLGHIRSRYGGTISDGFKRGSVIKHPKFGFCYVGGWQESPTKKDPSRKTISLHSLDTGKRLTQNALSNDCLFKAYSSWRVTAVKTAVRLSSTHLLSSGFQPYRGFSYDH

SEQ ID NO: 160 - protein, 371 aa, Dolichospermum sp.
MRVPVISVDNTPLMPTKPSRARQWIKDGKAIGKFDKLGIFYVQLLAEPSNTETQEIVIGLDPGKLFSGIAVQSKKFTLQMLHLVLPFKTVKDRMEQRSMMRRNRRGRRINRKLSFNVRNHRQARLDNRRGSKLPPSIRANKDLEYRVISLLLQLYPIKTIVIEEVEARGNKGFSPVMVGQRYQISRLSKLTNVVLKKGWETSNLRKHLGLHKEKSDKSLQIPETHAVDAVTLACSEFVKYQTWEGAKNHGASWVGGVDVTESQFTIVRRPPISRRQLHLMTFSKGGNRRKYGGSTTRHGFRKGDFVEASQGNKTFFGWVSGDTEKQVSVSDANWKRLGQCTVKKVKLIRRSTGLITTAVKTARVASLSALK

SEQ ID NO: 161 - protein, 365 aa, Microcystis sp.
MARVPVISKDGKSLMPTKPSRARRWIKEGKAIGKFNDLGIFYVQLIDEPSDSKTQPIAIGIDPGKLFSGIGVQSSLFTLWKAHLELPFKRVKERLDNRRLMRRGRRKRRINRQLSFNLRAHRQKRFSNRKQGKLAPSIRANRQLELRVVSELTKIYPITDIYFEYVKADVDLTSGRKGAKSGKGFSSVMVGQKWAIEQLSQLATVHTRFGWQTSNLRKYLGLEKSKNKAEQSPESHANDGIALACFQFLDYWPFHNYNGHGYDWKGSVKVTNAPFAVIKRPPISRRQLHLMVFSKGGKRRKYGGSTTGHGFRKGDLVSSPKGIGYVSGDTEKQLSVSDTNGQRLGQIAVSKIQLIRRSNGLIVSH

SEQ ID NO: 162 - protein, 424 aa, Chroococcidiopsis sp.; identical to SEQ ID NO: 117

SEQ ID NO: 163 - protein, 297 aa, Spirulina sp.
VNGWIIAECYGVLAAVGGLIESYPSSYEIIDQKRFNNRKQQKVPPSIRANRDLEFRVAQELSQLFPIATIGYEKVRADVDLTSGRKGAKSGKGFSPVMVGQAYAIEKMEQIAPVYTRYGWQQDGNGTAQLRSTLGLKKSQDKAEQIPQTHAVDGIALACGYFIEYRPFHRKRSHGYLWFGEVKLTSAPFVVIKRPPISRRQLHLMVPRQKGLRRKYGGTVTRHGFRKGDLVRAEMAGRVSVGYVSGDTTRQVSVSEFTGKRIGQFSAAKVELLYRATGILVSCPQRLSVSGAFNPAA

SEQ ID NO: 164 - protein, 402 aa, unidentified
  REGION 1..402: note = Ga0315284_10185211
MSSKKTHKKPVRAGNGRLKTFEPTVHGRTKDAASTSLACIPSVGQSRREKLPSANSLKKKRASLGLVMVPVLSSLGKPLMPCHPARARELIKQGRAVRRWYRGIFAIKLIDRSEGVIQQVVTGIDPGSKREAFTVKSQGRTYLNIMSDSVVWVSGRLYLRRCLRAFRRSRFTPCRKNKYNKRVNSKGLNPSFKSRWQIKLNIMKWLMRLYPISEVAVENIISKKRRGKSKFNFYFSQVEIGKNWFYEALKDIGLILHVIPAYYTKELRDKYGLKKGGNKKEERFRAHNVDSWTIANSILEGSSVVDNKVIFRIIPIPFHRRQLHRMQPEKKGIRKTYGGTISHGFKRGSVIRHKKWGLSYVGGAIRDRISLHSLKTGKRLCYNAKPKECNFLYMTKWRTYVV

SEQ ID NO: 165 - protein, 364 aa, Mastigocladopsis sp.
MRVPVLDINGKSLMPTKPSRARRWLKEGKAKVVHNDLNLFCIQLLVESSGTKTQPIALGLDPGKKFTGVGVQSAKVTLFMAHLILPFPDITKKMSGRLILRRARRGRRINRKAPFNKRAHRQKRFDNRKQNKLPPSIRANKELELRVTKELVKLFPVTQITYEYVKAKGNKGFSPVMVGQKVMLQWLEKFVPTNVQEGWQTSILRQQLGLAKDKKNKDKQTPETHAHDSVTLAASNFMKFEKFHTANTRGHRWEGFVKVTSAPFRVIARPNLFRRQLHFENPVKDVLGNRKRKGGTITPFGFRSGDLVKAEKAGKVYIGWIGGYTQTAKTKNVSVYDHNWHRLGQFSPSKVQLLQRSSRLCVAS

SEQ ID NO: 166 - protein, 365 aa, Microcystis sp.
MARVPVISKDGKPLMPTKPSRARRWIKEGKAIGKFNDLGIFYVQLIDEPSDSKTQPIAIGIDPGKLFSGIGVQSSLFTLWKAHLELPFKRVRERMDNRRLMRKGRRGRRINRQLPFNLRAHRQKRFSNRKQGKLAPSIRANRQLELRVVSELTKIYPITDIYFEYVKADIDLTSGRKGAKSGKGFSSVMVGQKWAIEQLSQLATVHTRFGWQTSNLRKYLRLEKSKNKAEQSPESHANDGIALACFQFLDYLPFHNSNGHGYDWKGSVKVTNAPFAVIKRPPISRRQLHLMVFSKGGKRRKYGGSTTRHGFRKGDLVSSPKGIGYVSGDTEKQLSVSDTSWKRLGQIAVSKIQLIRRSNGLIVSR

SEQ ID NO: 167 - protein, 365 aa, Cyanothece sp.
MLRVPVIAPNKTPLMPTKCSRARRWIKEGKALGRFNDLGQFYLQLIEQPSDNKTQPIAIGIDPGKFFSGIGVQSSLFTLWKAHLELPFQRVRERIDNRGLMRRSRRGRRINRKISFESRAHRQKRFSNRRQGKLAPSIKANRQLELRIISELSKIYPITDIYFEYVKADVDLTSGRKKARAGKGFSAVMVGQKWMLKQLKQFGNVHTRLGWQTCNLRKHLGLEKSKDKAKQSPESHANDGIALACFHFLDYREFHTHNSRGHDWIGKVYLTPSPFVVVKRPPISRRQLHLMVPSKGGIRRKYGGTTTDFGLRKGDLVNSPKGIGYVSGQTKKQISVSDANWKRLGQIASSKVILIQRSTGLIVSH

SEQ ID NO: 168 - protein, 334 aa, unidentified
  REGION 1..334: note = Ga0315273_10142751
MLVPVLSKDQQPLMPTTKHRAMKLVASREATPFWKRGIWCIRLNREPSGYAMQSVVIGVDPGSKKEGFSIVSEANTIANFQADAVTDVKEAVETRRNMRRARRFRNTPCRKNKSNRAKSPFPPSTKARWDLKLRIINFLAKLYPITHVIVEDVKARARKGCKKWNKSFSPLEVGKKYFYEALSSRYILRIRQGWENSEFRKELGLKKLNNKLSNDFHAHCVDGFCLAKWFIGGDNEPTSKQVGLIKPFKFSRRQLHVFQPAQGGERKNYGSTRSMGFKRGSIVKHEKYGICYVGGTSKARITLHNLFDGSRLSRCIKSEAVQFKAYSPWSLNYA

SEQ ID NO: 169 - protein, 388 aa, Spirulina sp.
MQRIPVQNPDGTPAMPTKSSRAQRWVAQGKAQWVKTNLRIKVVRLKAEPSGRNTQPIVVGLDPGKLYSGIAVQSAQATLFQSHLELPYPRVRERMDHRRMLRRSRRSRRINRELPFQLRNHRQKRFNNRKQQKVPPSIRANRDLEFRVVQELGQLFPIATIGYEKVRADVDLTSGRKGAKSGKGFSPVMVGQAYAIEKMEQIAPVYTRYGWQQDGNGTAQLRSALGLKKSQDKAEQIPQTHAVDGIALACGYFIEYRPFHRKRSHGYLWFGEVKLTSAPFVVIKRPPISRRQLHLMVPRQKGLRRKYGGTVTRHGFRKGDLVRAEMAGRVSVGYVSGDTTRQVSVSEFTWKRIGQFSAAKVELLYRATGILVSCPQRLSVSGAFNPAA

SEQ ID NO: 170 - protein, 365 aa, Microcystis sp.
MARVPVISKDGKPLMPTKPSRARRWIKEGKAIGKFNDLDIFYVQLTDEPSDNKTQPIAIGIDRGKLFSGIGVQSSLFTLWKAHLELPFKRVRERLDNRRLMRKGRRKRRINRQLPFNLRAHRQKRFSNRRQGKLAPSIRANRQLELRVVSELTKIYPITDIYFEYIKADIDLTSGRKGAKSGKGFSPVMVGQKWAIEQLSQLATVHTRFGWQTSNLRKHLRLEKSKNKAEQSPESHANDGIALACFQFLDYLPFHTSNGHGYDWKGYVKVTNAPFAVIKRPPISRRQLHLMVFSKGGKRRKYGGSITRHGFRKGDLVSSPKGIGYVSGDTEKQLSVSDTNGQRLGQIAVSKIQLIRRSNGLIVSH

SEQ ID NO: 171 - protein, 354 aa, Ktedonobacter sp.; identical to SEQ ID NO: 128

SEQ ID NO: 172 - protein, 388 aa, Spirulina sp.
MQRIPVQNPDGTPAMPTKSSRAQKWVAQGKAQWVKTNLRIKAVRLKAEPSGRNTQPIVVGVDPGKLYSGIAVQSAQATLFQSHLELPYPKVRERMDHRRMLRRSRRSRRINRELPFQLRNHRQKRFNNRKQQKVPPSIRANRDLEFRVVQELSQLFPIATIGYEKVRADVDLTSGRKGAKSGQGFSPVMVGQAYAIEKMEQIAPVYTRYGWQQDGNGTAQLRSTLGLKKSQDKAEQIPQTHAVDGIALACGYFIEYRPFHRKRSHGYLWFGEVKLTSAPFVVIKRPPISRRQLHLMVPRKKGLRRKYGGTVTRHGFRKGDLVRAEMAGRVSVGYVSGDTTRQVSVSEFTGKRIGQFSAAKVELLYRATGILVSCPQRLSVSGAFNPAA

SEQ ID NO: 173 - protein, 382 aa, Geitlerinema sp.
MRVPVVSKEGVPLMPTKPSRARRWLKEGKAVQKWSDVGVFYVQLTVEPSDTQTQEVAVGVDPGKHFSGVAVQSAKATLFMAHLILPFETVKKRMEQRRTMRRTRRSRRINRNVPFKFRNHRSSRFSNRKGHKLPPSIRANRQLELRVVRELAVIFPISTIVWEYVRADVDLTSGRRTARSGRGFSPVMVGQRWAIQQMEEIAPVVQLQGWKTANLRRELGLSKSGNKGEATPESHAVDGIALASSQFVRYESFHGTNVRGHRWKGSVCITPAPFRVIRRPPICRRQLHLLQPAQGGKRRKYGGTVNRNGFRKGDFVRASRAGRQYWGWVSGDTARQVSVSDINWKRLGQFSASKVQLLAPNTNLLVSGASNPTRPALCSSRA

SEQ ID NO: 174 - protein, 421 aa, Anabaena sp.
MAYATLRYQSLFKDKTFWIDWARGLKLVWENRSTWAKPKTAFSAYSKDYLFMRVPVISAKNIPLMPTKPSRARRWIKSGIAIGKFNKLGIFYVQLIAEPSDIQTQEIVAGLDPGKMFSGVAVQSQKYTLQMLHLVLPFKTVKDRMEQRAMMRRGRRGRKINRKLSFSQRSHRQTRFDNRRGSKLPPSIRANKDLEYRTISLLSEVYPIQTIVIEEVKAQGDKRFSPVMVGQRYQIKRLSKLANVELKKGWETSNLRKHLKLHKEKSDKSLQIPETHAVDAVTLACSEFVKYQIWEKVKSHGASWIGDVTITNSQFTILRRPPISRRQLHLMVPSKGGNRRKYGGTTTRYGFRKGDFVEATQGKKSFFGWVSGDTEKHVSVSDCNWKRFGQCTAKKVRLIQRNTGLIVLSTRKMFNLMASNH

SEQ ID NO: 175 - protein, 371 aa, Anabaena sp.; identical to SEQ ID NO: 156

SEQ ID NO: 176 - protein, 350 aa, Hapalosiphonaceae sp.
VKFVPVVDQSNRPLMPTIPSRAKRWIKSGKATPFFKKGVFCVRLNQEPSNRNTQPIAVGVDPGSKREGYTVKSQSHTYLNIQTHAVDWVKDHVEVRRNMRRARRFRNTPCRQNRKNRLVNKQKLPPSTKARWQWKLRICKWLTLMFPISTFVIEDIKAKTLIGAKKWNVMFSPLEVGKKWFYSELERLANLEPRTGNDTYEMRQALGLKKSKNKLSNKFDAHCVDSWVLANWFVGGHQKPENTQLIEIVPLEFHRRQLHRLQHSAGHIRSRYGGTISAGFKRGSVVRHLKFGFCYVGGWQESPTKKEPNRKTISLHSLWTGKRLTQNATSKDCIFKTYGSWRISTATKVA

SEQ ID NO: 177 - protein, 377 aa, Ktedonobacter sp.
MHGTMPMPLMHHEGSYNPGIDQEERKSFRSMRIPVVDTRGVPLMPCTPAKARQLFKSGKARPKRNKLGIFFVQLCYEQEPSNQPLVIGIDPGSKFEGFSVVGTQETVVNLMVEAPTHVKDAVKTRRTMRRARRFRKWRRPERYNNRLKGKKRIPPSTRSRWEAKARVVAHLKAILPLTDAVVEDVQAVTRKGKRRKWNLAFSPVQVGKQHLYSLLTEMSLQLHLKEGWETKQLREQYDLKKTKNKVKQAFESHCVDSWVLAACMSGAQQPSCQRLWYVVGAVLHRRQLHLLQFLKGGKRKPYGGTRSLGFKRGTLVIHPTYGLCMVGDFDRKKHTVSLHHYRTNKRLTRGGKPTMCMVKTWMAWRSWLVCLPRRERL

SEQ ID NO: 178 - protein, 410 aa, Spirulina sp.
VGSAQKHRTHWLKRPVVLELSSMQRIPVQNPDGTPAMPTKSSRAQRWVAQGRATWVKTNLRIKAVRLKAEPSGRNTQPIVVGLDPGKLYSGIAVQSAQATLFQSHLELPYPRVRERMDHRRMLRRSRRSRRINRELPFQLRNHRQKRFNNRKQQKVPPSIRANRDLEFRVVQELSQLFPIATIGYEKVRADVDLTSGRKGAKSGQSFSPVMVGQAYAIEKMEQIAPVYTRYGWQQDGNGTAQLRSTLGLKKSQDKAEQIPQTHAVDGIALACGYFIEYRPFHRKRSHGYLWFGEVKITSAPFVVIKRPPISRRQLHLMVPRKKGLRRKYGGTVTRHGFRKGDLVRAEMAGRVSVGYVSGDTTRQVSVSEFTWKRIGQFSAAKVELLYRATGILVSCPQRLSVSGAFNPAA

SEQ ID NO: 179 - protein, 314 aa, unidentified
  REGION 1..314: note = Firmicutes bacterium R50
VRRFRKGFFYLQLLDRTDGAAQPVACGIDPGSKWEGIAVKDARRTFVNLHVDAVTHVREAVTARRDMRRGRRYRKTPCRPPRANRARGGLPPSTRARWGWKLRIAGFLASLYPITHFVVEDVAAQTRPGQHRWNVRFSPLEAGKRWFSMELGRLAPVTMVPGYDTKRLRDARGLPKTANKSRETFWAHCVDAWVLAASVVGGAVPDHTPILRMAPLRFRRRSLHLRQPAKGGGRRRHGGTVSLGLRRGTQVLHPKFGFCYVGGYMGNRLSLHAMRDGRRLTQNARREDIVALAPCSWRVWRPKERRKGGAPPRG

SEQ ID NO: 180 - protein, 351 aa, unidentified
  REGION 1..351: note = Oscillatoriales cyanobacterium
MFVPVVNSENRPLMPTTNARAKRWIKSGKATPFWKKGVFCIRLNAEPSNHNYQPIAVGIDPGSKREGFTVKSKSHTYLNIQTHAIDWVKDRVEVRRNMRRSRRFRNTPCRQNRANRLVNKNRIPPSTASRWQWKLRIANWLTLMFPISTFVVEDIKAQKRKNGSPVWNVSFSPLEVGKKWFYCEIRKIAHLEIRSGNDTYELRQSLGLKKSKQKLSKKFEAHCIDSWVLANWYTGGHIQPDNTKLIEVISLEFHRRQLHRLQHSTGHIRSRYGGTLSAGFKRGSIVKHPKYGFCYVGGWQESPTKKEPDRKTISLHELKTGKRLTQNALPPDCKFLAYNSWRIANIVKPSF

SEQ ID NO: 181 - protein, 380 aa, Dolichospermum sp.
MRVPVISVDNTPLMPTKPSRARRWIKDGKAIGKFDKLGIFYVQLLAESSNTETQEIVLGLDPGKLFSGIAVQSKKFTLQMLHLVLPFKTVKDRMDQRSMMRRNRRGRRINRKLSFNKRNHRQARFDNRRGSKLPPSIRANKDLEYRVISLLLQLYPIKTIVIEEVEARGNKGFSPVMVGQRYQIVRLSQLTNVVLKKGWETSNLRKHLGLHKEKSDKSLQIPETHAVDAVTLACSEFVKYQTWEGAKNHGASWVGGVDVTESQFTIVRRPPISRRQLHLMAFSKGGNRRKYGGSTTRHGFRKGDFVEATQGSKTFFGWVSGDTEKQVSVSDAHWKRLGQCSVKKVKLIRRSTGLITTAVKTARVAAGERCRTIPLSTLCD

SEQ ID NO: 182 - protein, 365 aa, Dactylococcopsis sp.
MYRVPVISKDGKPLMPTKSSRARRWLNEGKAVVYKNDLHSFAVQLTIDSGKETQPIAVGIDPGKHYSGIGVQSSKATLFTAHLELPFQRVKNRMETRAMMRRSRRGRRINRKLPFDQRAHRQKRFNNRCGHKLPPSIKANRQLEYRVVKELSQLFPISSIIYEIVKARGDQGFSPVMVGQKVITEQWLPSIAPVTIKHGWETAKRRDTLGLEKDRNKSSQTPATHAVDGVALASYQFLKYKYLKGDKGWFEGSVEITNAPFSVIKRPPISRRQLHLMLPAKDAVRRKYGGTVTRHNVRKGDYVETERKGVKFRGWVSGDTKTQVSVSDFDWKRLGQFSAKNTQVLKRSTNLIVNTLNGGRAFLSH

SEQ ID NO: 183 - protein, 364 aa, Planktothrix sp.; identical to SEQ ID NO: 41

SEQ ID NO: 184 - protein, 365 aa, Microcystis sp.
MARVPVISKDGKPLMPTKPSRARRWIKEGKAIGKFNDLDIFYVQLTDEPSDNKTQPIAIGIDLGKLFSEIGVQSSLFTLWKAHLELPFKRVKERIDNRRLMRRGRRVRRINRQLSFNLRAHRQKRFSNRKQGKLAPSIRANRQLELRVVSELTKIYPITDIYFEYIKAYIDLTSGRKGAKSGKGFSSVMVGQKWAIEQLSRLATVHTRFGWQTSNLRKHLRLEKSKNKAEQSPESHANDGIALACFQFLDYLPFHTSNGHGYDWKGYVKVTNAPFAVIKRPPVSRRQLHLMVFSKGGKRRKYGGSTTRHGFRKGDLVSSPKGIGYVSGDTEKQLSVSDANGQRLGQMAVSKIQLISRSNGLIVSH

SEQ ID NO: 185 - protein, 392 aa, Spirulina sp.
MLRIPVLSPDGKPLMPTKPSRARRWIRDGVAVGKWSDVGMFYVQLTQQPSGENTQTIAVGVDPGKLYSGIGVQSPKATLFLAHLILPFQTVKDRMDQRRMMRRGRRGRRINRQVAYSQRAHRQKRFDNRGQSKLPPSIRANRQLELRVVTELCHLFPVSKIVYEYVKAKGSKSFSPVMVGQKVMLGWLSKLASVKTQFGYETASIRTQLGLVKSKDKSAQTPESHAVDGLALACSELIKYEPFHTANTRGQTWRGSVALTSSVFNVIHRPPVSRRQLHLMVPAKGGARRKYGGTTTRHGVRKGDIVRAEMAGRVYVGWVSGDTQRQVSVSNADWKRLGQFTASKVSLIARSTNLVVSGASLAQPARSAYPRNHRSYPSPTCVPRGGGISEVF

SEQ ID NO: 186 - protein, 389 aa, Spirulina sp.
MLRVPVLSPDGKPLMPTKPSRARRWIRDGLAVGKWSDLSVFYVQLTKQPSGEDTQSIAVGVDPGKLYSGVGVQSAKATLFLAHLILPFQTVKDRMEQRRMMRRGRRGRRINRQVDYSKRAHRQKRFNNRRQNKLPPSIRANRQLELRVATELCRLFPVSKIVYEYVKANGSKSFSPVMVGQKVMLGWLSKLAPVETQFGYKTANLRTQLGLVKSKDKSAQTPESHAVDGLALACSELVKYEQFHTANTRGHTWTGSVVLTPSVFRVIRRPPISRRQLHLMVPAQGGIRRKYGGTTTRHGVRKGDVVKAEMAGRVYVGWVSGDTQKKVSVSDANWKRIGQFTASKVQLLARANGLVVSRQPIVCFGDIVHTANTSVPPHPQGDAVSWRFL

SEQ ID NO: 187 - protein, 412 aa, unidentified
  REGION 1..412: note = Ga0373626_0090068
MVEAMQTLTRRLGESRVSGVADYKNARVRDLALDNSAEPLNAIAGLAASLSPLCNVEGRSTLTGEPVIGRVPVVSLSGRPLMPCRPSKARKLLEKGLAEKRWSKLVQFYLRLKFDPKSEPNKGQQVCLAADTGSKWDGVAVLSKQGVLTSGMLVLPSKVADKLKQRRQMRRARRYRKTPRRAKRFDNRRRPDGWIAPSQKAKVGFRIKVVDELCKLYPVSQFAVEDVKFNHYRKRWGKHFSTVEIGKTMFYKHLRKFGDLSLYTGVQTAEWRDKLGLPKNYRKNSLTWDSHAVDAIAIGCAESGCENPYPPEFWVWKGFEYTRRQLHRLEPEKGGVRRRYGGSWSIPPFKKGDVILWHGRLARVGGFMDGKVSLHSFGLRNKRLTQNAIPNECTKLFNQQIFNKSEQLQFFP

SEQ ID NO: 188 - protein, 364 aa, Crinalium sp.
MLRVPVISKNNLPLMPTKSSRARRWIEEGKAVGALDDLGQFYVQLIESASDNQTQPIAVGIDPGKLFTGIGVQSSRFTLWTAHLELPFKRVKERMDNRRLMRRGRRGRRINRQLPFNCRAHRQKRFSNRKRSKLAPSIKANRQLEIRVVSELCKIYPITDIYFEYIKADVDLTSGRKAAKSGSGFSAVMVGQKWAIEQLSKFARVHTRFGWQTSNLRKHLGLEKSKNKAEKSPKSHANDGIALACFRFLDYLPFHTANSHGHEWQGKVTLTSAIFVVVKRPPISRRQLHLMLPYQGGIRRKYGGTTTEFSLRKGDLVNSSKGIGYVSGQTKKQISVSDANWKRLGQIASSKVTLIRRSTGLIVS

SEQ ID NO: 189 - protein, 294 aa, unidentified
  REGION 1..294: note = Subsurface metagenome
MSQNNQVTRVPVISKDFKPLMPTTPARARKWIKIGKAIGKRNKVGVFYVQLLYEASGRETQEIVAGTDRGKAFTGIAFQSKLATIALFHACLPGFYKSKNKTKDRQSVTGKMAKRNELRRTRRGQRINRKITFKLRNYREKRFHNRRQNKIPPSVKANREMELRILTEMSKNVPICEIRDEACGGNTYSNGRGISPVTVGQEWFRTQASLIAPVVEVDSLDTGKYRDQLGLVKDKKDKSKQTPETHANDAIALASTAFIQYKAFHTANSHGHNWVGECLVTKAPFPHDYSTQVI

SEQ ID NO: 190 - protein, 348 aa, unidentified
  REGION 1..348: note = fermentation metagenome
MRVPVMDTHRTPLMPTTPTRARLLLKQGKAKPYWNKLGIFCIILTYTVEPDNRSLVVGIDPGSSFEGWSVVGTKETVLNGMSEAPKHVKKAVEVRRTMRRARRHRKCWRRPARFNNRSRNKEALPPSTFARWNAKIRILEQLRKVLPITDVVVEDVAAGTKKNCTWWNTNFSPLEVGKQWFYRTIRDRGLDLHLHAGYETKELRERFGLKKTRQKSKQVFAAHAVDAWVMAADVSGAEHPTERGLYYWAPIRFFRRQLHRLQPEKGGNRKPYGGTRSLGFSRGTLVRHIKHGLTYLGGTLKGRVSLHSAVTGKRVTQNAKVEDCTILTRIAWRTQLYAGTGRRHSSPA

SEQ ID NO: 191 - protein, 365 aa, Dactylococcopsis sp.
MYRVPVISKEGRPLMPTKTSRARRWLKEGKAVIYKNDLHSFAIQLTVDSGEEIQPIAVGVDPGKHYSGIGVQSSQATLFTAHLELPFQRVKDRMETRAMMRRGRRGRRINRKLPFDQRAHRQKRFDNRRGHKLPPSIKANRQLEYRVVKELSQLFPISSIIYEILKAKGDKGFSPVMVGQKVMTEQWLPSIAPVTTKFGWETARRRDSLGLEKDREKSNQNPATHAVDGVALASHDFLKYKYLKGDKGWFEGSVEITNAPFSVIKRPPVSRRQLHLMLPAKGGVRRKYGGTVTRHGFRKGDYVETERKGVKFRGWVGGDTKTQVSVSDFDWKRLGQFSAKKTQLLKRNTNLIVNTQTGGRAFLSQ

SEQ ID NO: 192 - protein, 410 aa, Spirulina sp.; identical to SEQ ID NO: 142

SEQ ID NO: 193 - protein, 343 aa, unidentified
  REGION 1..343: note = Candidatus Poribacteria bacterium
MYVPVKTKEGKQLMPTPPPVARHLIKSGKATPYWSHGVFCIRLNYETTAYTQDTVVGVDPGSKKEGFTVKSATHTYLNIQADAHNKVGKKVEKRRELRRGRRSRKCPNRKNRTNRLSNKARIPAGTRARWDWKLRVLDWLSKVYPITYVCVEDIQAPTIQHAKKWNKSFSPLEVGKQWFYTEIEKRWELRTLQGWQTKEIRESLGLKKSSNKLSETFAAHCVDSWCLAYQTVGGSDTPDNMDLLCLSPIPIRRRELHRQNPQKGGKRPRYGGTVLGTPGNLVKNTLIQHVKYGFARLAGVSSRGLFSIYSMENKRLTTSAKRSDFRVLTRLNFCYRSGVSSPV

SEQ ID NO: 194 - protein, 343 aa, unidentified
  REGION 1..343: note = Candidatus Poribacteria bacterium
MFVPVVDKNQNPLMPTKPSRARKWIRDKKATPFWKNGVFCVRLNVDPSDRYFQEIVVGVDPGSKKEGFTVKSEAHTYLNIQADAHRGVGKKVEKRRELRRGRRSRKSPNRKHKQHNLSNRERIPAGTRARWDWKLRILQWLSKLYPVTHVCVEDIKARTVPSAKKWNQSFSPLEVGKQWFYTEIRKRWALLTLQGWQTKEIRDRLGLKKSSKKLAETFDAHCVDSWCLAYHSVGGDHSIPDNTDIFCISPIPIRRRELHRQNPQKGGKRPRYGGTVLGDGLIKNTLIKHVKHGLTRLAGINGKGLFSIYSLDGKRLTTGAKRTDFQVLTRLNFNYKGGVSSPC

SEQ ID NO: 195 - protein, 365 aa, Microcystis sp.
MARVPVISKDGKPLMPTKPSRARRWIKEGKAIGKFNDLGIFYVQLTDEPSDSKTQPIAIGIDPGKLFSGIGVQSSLFTLWKAHLELPFKRVKERMDNRCLMRRGRRGRRINRQLPFNLRAHRQKRFSNRRTGKLAPSIRANRQLELRVVSELTKIYPITDIYFEYIKADIDITSGRKGAKSGKGFSSVMVGQKWAIEQLSQLATVHTRFGWQTSNLRKYLRLEKSKNKAEQSPESHANDGIALACFQFLDYWPFHNSNGHGYDWKGSVKVTNAPFAVIKRPPVSRRQLHLMVFSKGGKRRKYGGSTTRHGFRKGDLVSSPKGIGYVSGDTEKQLSVSDTSWKRLGQIAVSKIQLIRRSNGLIVSR

SEQ ID NO: 196 - protein, 384 aa, Geitlerinema sp.
MRVPVVSKEGVPLMPTKPSRVRRWLKEGKAVKKWSDVGVFYVRLTVDPSNTQTQEVAVGVDPGKHFSGVAVQSAKATLFMAHLILPFETVKKRMEQRRTMRRTRRSRRINRNRNVPFKFRNHRSSRFNNRCQNKLPPSIRANRQLELRVVRELAAIFPISTIVWEYVRADVDRTSGRRKARSGRGFSPVMVGQRWAIREMEEIAPVVQLQGWKTANLRRELGLVKSGNKDDASPESHAVDGIALASSQFVRYESFHGTNVRGHRWKGSVCITPALFRVIRRPPICRRQLHLLQPAKGGTRRKYGGTVTRHGFRKGDFVRASRAGRQYLGWVSGDNARQVSVSDINWKRLGQFSASKVQLLAPNTNLLVLGTSNPTRPAFCSSRA

SEQ ID NO: 197 - protein, 365 aa, Microcystis sp.
MARVPVISKDGKPLMPTKPSRARRWIREGKAIGKFNDLDIFYVQLTDEPSDNKTQPIAIGIDPGKLFSGIGVQSSLFTLWKAHLELPFKRVKERMDNRRLMRRGRRGRRINRQLPFNLRAHRQKRFSNRRQGKLAPSIRANRQLELRVVSELTKIYPITDIYFEYIKADIDLTSSRKGAKSGKGFSPVMVGQKWAIEQLSQLATVHTRFGWQTSNLRKHLRLEKSKNKAEQSPESHANDGIALACFQFLNYLPFHTSNGHGYDWKGYVKVTNAPFAVIKRPPVSRRQLHLMVFSKGGKRRKYGGSTTRHGFRKGDLVSSPKGIGYVSGDTEKQLSVSDTSWKRLGQIAVSKIQLIRRSNGLIVSH

SEQ ID NO: 198 - protein, 366 aa, Halothece sp.
MSNLRLMVRSGSTHDKGCVREERSEVKVSCCVLKTSLEGDLQAEFNYSGIGVQSSKTTLFTAHLELPFQRVKDRMETRAMMRRNRRGRRINRKLPFDQRSHRQKRFSNRRGNKLPPSIKANRQLEYRVVKELSQLFPITSIIYEIVKAKGDKGFSPVMVSQKVMTEQWLPNIAPVTAKYGWETSKRRELLGLEKDKQKSNQTPATHAVDGVALASHEFLKYKFLKGDQGWFEGSVEITNAPFSVIKRPPVSRRQLHLMIPAKGGIRRKYGGTVTRHGFRKGDYVEVERKGIKYRGWVSGDTKTQISVSDFGWKRVGQFSAKKTQLLKRSTNLIVNTSNGRRAFLRGVASGVSPDVYTPRLPLNQRL

SEQ ID NO: 199 - protein, 365 aa, Microcystis sp.; identical to SEQ ID NO: 195

SEQ ID NO: 200 - protein, 382 aa, Pleurocapsa sp.; identical to SEQ ID NO: 131

SEQ ID NO: 201 - protein, 365 aa, Microcystis sp.
MARVPVISKDGKPLMPTKPSRARRWIKEGKAIGKFNDLDIFYVQLTDEPSDNKTQPIAIGIDQGKLFSGIGVQSSLFTLWKAHLELPFKRVKERMDNRCLMRRGRRGRRINRQLPFNLRAHRQKRFLNRRQGKLAPSIRANRQLELRVVSELTKIYPITDIYFEYIKADVDLTSGRKGAKSGKGFSPVMVGQKWAIEQLSQFATVHTRFGWQTSNLRKHLRLEKSKNKAEQSPESHANDGIALACFQFLDYLPFHNSNGHGYDWKGYVKVTNAPFAVIKRPPISRRQLHLMVFSKGGKRRKYGGSTTRHGFRKGDLVSSPKGIGYVSGDTEKQLSVSDTSWKRLGQIAVSKIQLIRRSNGLIVSH

SEQ ID NO: 202 - protein, 399 aa, Synechococcus sp.
MASHADIGAGRDLHRASALDYINSLSTLMRVPVVDKNHQPLMPAKPSRVRRWLKAGKAVKQWSDVGVFYVQLTGEPSGTETQSVVVGIDPGKKYSGIGVQSAKATLLMAHLVLPFETVRKRMATRAMMRRTRRSRRINRNVLFQFRNHRQKRFDNRKSKKVAPSIRANRQLELRVLKELQAIFPVSKVVYELVKAKGDNRFSPVMVGQNWMLEQIVNRCELVTKFGYDTANLRRALGLFKSQKKSDQTPETHAVDGVALASSEFIRYESVHSLKSDGALWKGAVAITPAAFSVIRRPPISRRQLHLLQFREGGIRRAYGGTTTRHGFRKGDLVLAEKAGRSFVGWVSGDTAKQVSVSDSNWKRLAQFTASKVQLMKRSTGLLASGASRVTQPALYPSAR

SEQ ID NO: 203 - protein, 358 aa, Moorea sp.
MLRVPVISPDGKPLMPTKASRARRWIKKGLATIHQNDLGLFAVQLINQPSGEKTQDIAVGIDPGKRFSGIAVQSNRATLWTGHLVLPYKKVRVRMDTRRMMRRTRRSRRINRKVPYSQRSHRQKRFDNRTNKKIPPSIRANRQLEQRVIKELNSLYPVKSIVYEVVKARGNKGFSPVMVGQYWSISQLEKIAPVTQKQGWETALKREALGLIKDKADKSRQTINTHGVDGIALAATHFSSRKNYYHNRGKLSVPKNCDVTNAVFSVVKRAPISRRQLHLLQFSKGGKRRKYGGTTTHHGFRKGDYVEAVKAKIISRGWVSGETVKQVSVSDANWKRIGQFTARKVRLLKRATGLIVNH

SEQ ID NO: 204 - protein, 401 aa, Ktedonobacter sp.
MSTDATLIRTTPSHAEADATDTLVATPLMPPRRVISPWPGPGEGQSLMRIPVVDIRGMALMPCTPAKARHLLKSGNARPKRNKLGLFYVQLSYEQEPDNQSLVAGVDPGSKFEGLSVVGTKDTVLNLMVEAPDHVKGAVQTRRTMRRARRQRKWRRPKRFHNRLNRMQRIPPSTRSRWEAKARIVAHLRTILPFTDVVVEDVQAVTRKGKGGTWNGSFSPVQVGKEHLYRLLRAMGLTLHLREGWQTKELREQHGLKKTKSKSKQSFESHAVDSWVLAASISGAEHPTCTRLWYMVPAILHRRQLHRLQASKGGVRKPYGGTRSLGVKRGTLVEHKKYGRCTVGGVDRKRNTISLHEYRTNTRLTQAAKVETCRVLTWLSWRSWLLRGKRTSSKGKGSHSS

SEQ ID NO: 205 - protein, 269 aa, unidentified
  REGION 1..269: note = Microcoleaceae bacterium UBA11344
MFVPVVDSENRPLMPTTPSRAKRWICSGKATPFWKKGVFCVRLNVEPSNTDRQPIAVGIDPGSKREGFTVKSKSHTYLNIQTHAIDWVKDRVEVRRNMRRARRFRNTPCRQNRANRLVNKNRIPPSTKARWEWKLRIVNWLTLMFPISTFVVEDIKARTWQNGRKWNLSFSPLEVGKHWFYDQLRKIAHLEIRSGNDTYELRQNLGLKKSKQKLSNKFEAHCVDSWVLANWYALGHIHPDNTKLIEIVPLEFHRRQLHRLQHSWRPGPL

SEQ ID NO: 206 - protein, 365 aa, Microcystis sp.; identical to SEQ ID NO: 201

SEQ ID NO: 207 - protein, 364 aa, Planktothrix sp.; identical to SEQ ID NO: 41

SEQ ID NO: 208 - protein, 365 aa, Microcystis sp.
MARVPVISKDGKPLMPTKPSRARRWIKEGKAIGKFNDLDIFYVQLTDEPSDSKTQPIAIGIDPGKLFSGIGVQSSLFTLWKAHLELPFKRVRERMDNRRLMRKGRRGRRINRQLPFNLRAHRQKRFSNRKQGKLAPSIRANRQLELRVVYELTKIYPITDIYFEYVKADIDLTSGRKGAKSGKGFSPVMVGQKWAIEQLSQLATVHTRFGWQTSNLRKYLLLEKSKNKAEQSPESHANDGIALACFQFLDYLPFHNSNGHGYDWKGSVKVTNAPFAVIKLPPISRRQLHLMVFSKGGKRRKYGGSTTRHGFRKGDLVSSPKGIGYISGDTEKQLSVSDTSWKRLGQITVSKIQLIRRSNGLIVSH

SEQ ID NO: 209 - protein, 365 aa, Scytonema sp.; identical to SEQ ID NO: 24

SEQ ID NO: 210 - protein, 344 aa, Scytonema sp.; identical to SEQ ID NO: 18

SEQ ID NO: 211 - protein, 385 aa, Halothece sp.
MNRIPVVSKDGQPLMPTKPSRARKWIESGRAISKWSDLGLYYVQLLQEPSGTETQPVVAGLDPGKSYSGVGVQSAKCTLLQLHLILPFGRVRSRMDQRRLLRRSRRSRRINRDVPFKLRNHRQKRFDNRRGKKLAPSIRASRQLEIRVVKEIASIYPITAIGYEKVRADVDLTSGRKGARSGKGFSPVMIGQQFCISELEKIAPVYVREGWQKDGNGTSQLRTALGLVKDKQNKSEAKPETHSVDGVALACGYFIQFRRFHSSCGHGKTWKGKVTTTNSQFRIITRPGAVKRGKEYGVFRRQLHFEIPGQNGVRKRKGGTITPWGFRVGDLVRATKGKTESIGYIGGYSEVNKVMSLYDWQWKRIGQFSVSKTTLIRRSNGLCVA

SEQ ID NO: 212 - protein, 437 aa, Sulfobacillus sp.
MRIAVVSLYGKPLSPTTPAKARKLIKSGGAIPKRDKLGTFYLQLTTPTRETIPHDTVAGIDPGKLYSGLGVQTPQATLWMGHLVLPFPVVKKAMKTRKTLRGFRRYRKTPQRSIRFLHRTGHKLPPSIRANRDLEWRVLQELAKIYPITHVVYEVVKARGNKSFSPVMVGQQWQIDRIAQQWPLTPRYGWETQRLRDALGLYKTRTKAERSPASHAVDGVALAASHFLRYVPFYEKNGDHGQRWEGHCDITDAPFAVIGRPLWHRRALHDQNPTQGGQRERFGGTTTPWGFRKGDFVEATKADRTVRGYVSGYTHTAKTRSLAVADARWHRLGQFVVSHVRLLRRSTRLLIDAVASSAFLPPLNFVAAGESCRDSVEGGPLIMRISDHLKQGQSLPRQVWGAIRPVTRSVPPKKGRHAPYRRQPRRRLDQGGDREPD

SEQ ID NO: 213 - protein, 351 aa, Acidithiobacillus sp.
MDQQSEKTVFVPVMDRDGKTPLMPTTPSRARRWIKSGEATPFFRKGVFCVRLNRAPSGQGRQPIVAAADPGSKREGFTVKSKAHTYLNVHAEAVTWVKDAVETRKDMRRGRRFRKTPCRKPGPSDAMMNASKRIPPSTKARWGWKLRVFNWLSALFPVTDIGVEDVQAATRKGKRKWNQSFSPLQVGKDWFYAEIRRMGVTLHLRAGFETKALRDRFGLKKTGRKLAETFAAHCVDSWVIAWDIVGGNESPDNRDLLCIQPIRLHRRQLHRLQPQKSGARLSYGGTRSHGFKRGSLVRNAKWGLAYVGGVLKDRMSLHHIESGKRLTQQAKPADCRFLTYNIWKFHCVAHA

SEQ ID NO: 214 - protein, 297 aa, Spirulina sp.; identical to SEQ ID NO: 163

SEQ ID NO: 215 - protein, 349 aa, Desulfitobacterium sp.
MSTKPSEQPRVPVVSIDGKSLMPTTPKKARLLLKDGQAKGKRNKIGLFYIQFIRPVGNEIQPMALANDPGAKYDGIAVASPKQIELKAMLFLPVGVPKKMETRRNLRRVRRFRNTPRRPARFNNRKRKKYWLAPTQRSKVETRLKAVRELCRIYPIQQLISEDVRFNHAKSREGRYFSTVEIGKTYTYQEYRKLAKLRLVEVTDTDAWRERYGLEKRTEKKWEQVPETHANDAVAMLMGVTGCRKKETPFYIWHRLQYARRSLHRQTYQKGGKRPRFGGTTNGSYFRKGDWVEAEKAGIVYRGWVCGLPTDTSKVLGIADADGKRIGQFSLNKVGLLARSTGFSWRAAV

SEQ ID NO: 216 - protein, 406 aa, Symploca sp.
LYPSKSSDSGRFKKGHLCADGGKEQVTFKVKDYLQMQRVPVISPEGKALMPTKPSRARKWLRDGKAAIYKNDLNIFAIQLINEPSGHETQDVVIGIDPGKMFSGVGVQSSKATLLKLHLILPFPNITKKMAGRRILRRARRGRRINRKLPYSQRCHRAKRFDNRVQKKLPVGIKANRQLELRVVKEICQIFPISHIVYEYIKTRGDKGFSPAMVGQKVMLAWLGEIAPTATIFGWETSNIRQWLKLPKDKSDKSKPCPETHSNDGVALASSHFIRWKEWQSAKAHGGYWDGEVVITQAPFKVIAKPNIYRRQLHFENPDSKKPNPTQYRKRKGGTVTPFGFRSGDFVQAQKAGQVYRGWIGGYTQTAKTKKVSIYDVNWKRIGQFSPNKVKLLKRSTKLLLSSAIS

SEQ ID NO: 217 - protein, 365 aa, Dactylococcopsis sp.
MYRVPVRSKNGKPLMPTKASRARRWLKEGKAVIYKNDLHSFAVQLTIDSGEETQPIAVGIDPGKHYSGIGVQSSFMTLFTAHLELPFQRVKDRMETRAMMRRNRRGRRIDRKLPFNQRSHRQKRFNNRRCHKLPPSIKANRQLEYRIVKELSQLFPISSIIYEIVKAKGDKGFSPVMVSQKVMTEQWLPQIAPVTTKYGWETSARREMLGLEKDREKSNQTPATHAVDGVALASYQFLKYKRIKGYKGWFEGSVEITNAPFSTIKRPPVSRRQLHLMIPAKGGVRRKYGGTVTRHDFRKGDYVETERKGIKYRGWVSGETKNQVSVSGFDWKRLGQFGAKKTQLLKRNTNLIVNTQTGGRAFLSR

SEQ ID NO: 218 - protein, 401 aa, Arthrospira sp.
MFDSVGEETQTRKRFITMLRVPVLSPSGKPLMPTKPSRARRWIRDGVAVGKWSDLGVFYVQLTQQPSGEETQPIAVGVDPGKLYSSVGVQSPKATLFLAHLVLPFPAVKDRMKQRRMMRRGRRGRRINRNWAYSQRAHRQKRFNNRRQNKLPPSIRANRQLELRVVTELCRLFPVSNIVYEYVKAKGSKSFSPVMVGQKVMLGWLSKLAQVKTQFGYETANLRTALRLVKSKDKSAQTPETHAVDGLTLACSELVKYEPFHTANTHGHTWKGLVQLTPSIFKVIRRPPISRRQLHLMVPAKGGVRRKYGGTTTRHGVRKGDIVRAEMAGRVIVGWVSGDTHRQVSVSDLNWKRLGQFTASKVSLIARSTNLVVSGALNPTQPPLLSLPHLLREDGGFSENF

SEQ ID NO: 219 - protein, 401 aa, Ktedonobacter sp.; identical to SEQ ID NO: 204

SEQ ID NO: 220 - protein, 365 aa, unidentified
  REGION 1..365: note = uncultured cyanobacterium
MIRVPVLDKNGKPMMPTKASRARRWLKEGKAKIVQNDLNIFGIQLLVEPSGYDTQSIALGLDPGKKFTGVGVQSVKFTLFMAHLILPFSDVTKKMDGRRLLRRARRGRRINRKVTFNQRAHRQKRFNNRKQNKLPPSIRANKELELRITKELVKLFPVTQITYEYIKAKGDKGFSPVMVGQKVMLEWLCEIAPTNTQEGWQTSILRQQLGLSKDKKDKSKQTPETHAHDGIALASSNFMRFEKFHTANSRGHRWVGFVAITPAPFRIIARPNLFRRQLHFENPVKDIPGNRKRKGGTITPFGLRSGDLVKAEKAGKFYIGWIGGYTQTPKTKNVSVYDHNWRRIGQFSPAKVQLIKRSTKLCVKA

SEQ ID NO: 221 - protein, 339 aa, Microcoleus sp.
MQYVPVVDFEQRPLMPTTPARAERWIKSGKATPFFRKGIFCVRLNVEPSNRHTQPVAVGIDPGSKREGYTVKSKAHTYLNQQFHAVDWVKEAEETSTNARRARRNRKTPCRQPRQNRSRGGIPPSTKARWQFKIRVVKVFDSILPISGIGIEDVKALTKKGCHKWNTSFSPLEVGKKWCYSELERIAPVTQFDGYTDTYLTRQKLGLKKSKVKLSNVFYAHCVDSWVLAYLLVGGDRSPENMVVMECKPIRIYRRQLHVFNPGKNGYRRPYGGSMSQGLKRGGIVKHLSYGKCYVGGEDSKKSRISLHSLGTGKRLCQNAKPTDCKFLAYNSWRTVKPS

SEQ ID NO: 222 - protein, 366 aa, Ktedonobacter sp.
MRIPVVDTRGIALMPCTPAKARHLLKSGNARPKRNKLGLFYVQLSYEQEPDNQSLVAGIDPGSKFEGVSVVGTKDTVINLMVEAPDHVKGAVEARRTMRRARRQRKWRRPKRFHNRLNRTQRIPPSTRSRWEAKARIVAHLRTILPFTDVAVEDVQAVTRKGKGGTWNGSFSPVQVGKEHLYQLLREMGLTLHLREGWQTKELREQHGLKKTKSKSKQSFESHAVDSWVLAASISGAEHPTCTRLWYMVPAILHRRQLHRLQASKGGVRKPYGGTRSLGVKRGTLVEHKKYGRCTVGGVDRKRNTISLHEYRTNTRLTQAAKVETCRVLTWLSWRSWLIRGKHTSSKGKGSPLPSPNEGTPVSSPG

SEQ ID NO: 223 - protein, 351 aa, Acidithiobacillus sp.; identical to SEQ ID NO: 213

SEQ ID NO: 224 - protein, 351 aa, Microcystis sp.
MPTKPSRARRWIKEGKAIGKFNDLGIFYVQLTTEPSNSKTQPIAIGIDPGKLFSGIGVQSSLFTLWKAHLELPFKRVRERMDNRRLMRKGRRGRRINRQLPFNLRAHRQKRFSNRKQGKLAPSIRANRQLELRVVSELTKIYPITDIYFEYIKADVDLTSGRKGAKSGKGFSSVMVGQKWAIEQLSQLATVHTRFGWQTSNLRKHLRLEKSKNKAEQSPESHANDGIALACFQFLDYLPFHNSNSHGYDWKGYVKVTNAPFAVIKRPPISRRQLHLMVFSKGGKRRKYGGSTTRHGFRKGDLVSSPKGIGYVSGDTEKKLSVSDTNWKRLGQIAVSKIQLIRRSNGLIVSH

SEQ ID NO: 225 - protein, 388 aa, Symploca sp.
MLRVPVISKSGKPLMPTKASRARRWLTEGKARVFHNDLNIFAVQLFTQTGVETQPISVGVDPGKMYSGVGVQSAKATLWMAHLVLPFKTITERMEQRRIMRRARRGRRINRKIPYRQRCHRQKRFNNRRQSKLPPSIRANKQLELRVVKELMRIYPISIIHYELVMADVDKTSGRKGAKSGVGFSPVMVGQKQMLRWLSNLANVVTHKGWQKDCNGTSQLRKWLGLEKDKKNKANQTPATHAVDGVTLAAFEFIQWKEWHSSKSKHGAWVGDVCITSAPFAVIRRPPVSRRQLHLCLPAKGGNRRKYGGSVTRHGFRKGDLVIAQKAGKSYRGWVSGDTKTQVSVSDGNWKRLGQFSAKKVQLLQRRVGLIVTPVVGLSKLTPSRGQF

SEQ ID NO: 226 - protein, 365 aa, Microcystis sp.
MERVPVISKDGKPLMPTKPSRARRWIKEGKAIGKFNDLDIFYVQLTDEPSDNKTQPIAIGIDPGKLFSGIGVQSSLFTLWKAHLELPFKRVKERMDNRRLMRKGRRKRRINRQLSFNLRAHRQKRFSNRKQGKLAPSIRANRQLELRVVSELTKIYPITDIYFEYIKADVDLTSGRKGAKSGKGFSPVMVGQKWAIEQLSQLATVHTRFGWQTSNLRKYLRLEKSKNKAEQSPESHANDGIALACFQFLDYLPFHNYNGHGYDWKGSVKVTNAPFAVIKRPPVSRRQLHLMVFSKGGKRRKYGGSTTRHGFRKGDLVSSPKGIGYISGDTEKQLSVSDANGQRLGQIAVSKIQLIRRSNGLIVSH

SEQ ID NO: 227 - protein, 365 aa, Calothrix sp.
MIRVPVLDKNGKPLMPTKASRARRWLKEGKAKIVHNDLNVFCIQLLVEPSGQKKQPIALGLDPGKKFTGVGVQSAKFTLFMAHLILPFPNVTKKMSGRLILRRARRGRRINRKMAFHKRAHRQKRFDNRKQNKLPPSIRANKELELRITKELVKLFPVTQITYEYVKAKGDKGFSPVMVGQKVMLQWLEKIAPTNKHSGWQTSTLRQQLGLTKDKKNKEKQAPKTHAHDGIALAASNFMQFEKFQTPNTRGHRWVGEVVVTSAPFRVVARPRVFRRQLHFENPVKDVPGHRKRKGGTVTPFGFRSGDLVKAEKGGKAYIGWIGGYTQTIKTKNVSVYDHNWHRLGQFSPSKVQLLKRSTRLCVTS

SEQ ID NO: 228 - protein, 354 aa, Acidithiobacillus sp.
MNQQSQKTGKTVFVPVMDRDGKTPLMPTTPSRARRWIQRGEATPFFKKGVFCIRLNRAPSGQKTQSVVAAVDPGSKREGFTVKSRAHTYLNIQTEAVTQVKDAVKTRSEMRRGRRFRKTPCRKPGPANAMMRKENRIPPSTKARWGWKLRVLHWLCALFPVTDIGVEDVQAATRKGKRKWNVSFSPLQVGKDWFYEEIRHMGVTLHLRAGFETKTLRDRLGLKKTSNKLAETFAAHCVDSWVIAWDIVGGVESPDNRDLLCIQPIRLHRRQLHRLQPQKGGERLPYGGTRSHGFKRGSLVRHAKWGLAYVGGILKDRISLHCIENGKRLTQKAKPAECRFLTFNAWKFHCVAHT

SEQ ID NO: 229 - protein, 364 aa, Westiellopsis sp.
MFVPVVAQSSRTLMPTTPSRARRWVKSGKATPFFKKGVFCVRLNQEPSNRSTQPIAVGVDPGSKREGFTVKSQSHTYLNIQTHAVDWVKDHVEVRRNMRRARRFRNTPCRQNRKNRLVNKQKLPPSTKARWQWKLRICKLLTLIFPVSTFVIEDIKAKTLIGAKKWNVMFSPLEVGKKWFYSELETIANLETRTGNDTYENRQNLGLKKSKNKLSNKFDAHCVDSWVLANWFVGGHQKPENTQLIEIVPLEFHRRQLHRLQHSAGHTRSRYGGTISAGFKRGSVVRHPKFGFCYVGGWQESPTKKDPNRKTISLHSFATGKRLTQNATPKDCIFKAYGSWRTSTATKGATAVLGFPQVEQVAFA

SEQ ID NO: 230 - protein, 365 aa, Halothece sp.
MYRVPVISKNGKPLMPTLPSRARRWLKEGKAVIYKNDLHSFAIQLTVDSGEEIQPIAVGVDPGKHYSGIGVQSSQATLFTAHLELPFQRIKDRMETRTMMRRGRRGRRINRKLPFDQRAHRQKRFDNRRGHKLPPSIKANRQLEYRVVKELSQLFPISSIIYEIVKAKGDKGFSPVMVGQKVMTEQWLPSIAPVTTKFGWETARRRDSLGLEKDREKSNQNPATHAVDGVALASHDFLKYKCLKGDKGWFEGSVKITNAPFSVIKRPPVSRRQLHLMIPAKGGVRRKYGGTVTRHGFRKGDYVETERKGVKFRGWVGGDTKTQVSVSDFDWKRLGQFSAKKTQLLKRNTNLIVNTQTGGRAFLSQ

SEQ ID NO: 231 - protein, 335 aa, unidentified
  REGION 1..335: note = Candidatus Poribacteria bacterium
MLVPVVDKKRNPLMPTTPARARKWVKSGKATPFFRNGVFCVRLNVEPSGTQTQDIAVGIDPGSKKEGFTVKSEKSTYLNVQADAHNKVSKKVETRRQLRRGRRSRKCPNRKHRTNRMANKQRLPAGTRTRWDWKLRILNWLSTMFPITHVCIEDIKTQTRQGARNWNESFSPLEVGKQWFYTEIQKRWILVTLRGFETKAIRDSLGLQKSGNKMSNDFNAHCVDSWCLAYHVIGSNTDQVDNTCVFYVSPIPIARRQLHRQNPQKGGRRPRYGGTMCNGIAKNTLVKHVTYGLTRVSGYMEKKGYSLYALGGKRLTQSAKRENFKVLTRLNFNYI

SEQ ID NO: 232 - protein, 364 aa, Westiellopsis sp.; identical to SEQ ID NO: 229

SEQ ID NO: 233 - protein, 269 aa, unidentified; identical to SEQ ID NO: 205
  REGION 1..269: note = Microcoleaceae bacterium UBA11344

SEQ ID NO: 234 - protein, 367 aa, Hydrococcus sp.
VIRVPVLNPDGTPAMPTKPSRARRWLREGKAVIAHNDLNVFCIQLVAEPSGRKTQDVIVGVDPGKLFTGIGVQTSKATLFTAHLILPFKSVTKKMTSRRQLRRTRRGRRINRKVVFKVRAHRQKRFSNRRQGKLPPSIRANKQLELRVVKELLKLFPISHIRYEIIKARTENGKGKGFSPAMVGQKIMLQWLGDLRPTATQYGWQTSILRQQLGLTKDKADKSKQSPETHANDGIALAASHFMRFEQFYTANTRGHCWVGQIEVTDSPFRVISRPNIYRRQLHFENPEKGGIRKRKGGTVTPFGFRSGDLVKACKAGEIIRGWIGGFTNSEKTKNVSVYDHNWKRIGQYALSKVKLLHRSTGICVAR

SEQ ID NO: 235 - protein, 201 aa, Microcoleus sp.
MVGQRQMLTWLSELAPVTIHKGWQRDGNGTSQLRKWLELPKDKKDKANQTPGTHAVDGVTLAAFEFTQWREWHSNQAKYGNWYGDVQITPAPFAIVRRPPISRRQLHLCVPSKGDVRRKYGGTVTRHGFRKGDKVVAQKAGKVYIGWCSGDTEKQVSVSDKNWKRLGQFSAKKVQLLQRSTGLIVVPSTGLSNLATRCGKI

SEQ ID NO: 236 - protein, 348 aa, Nostoc sp.
MQGLIAMFVLVVDTNQRPLMPTTQSRARRWVESGKATPFWKRGIFCVRLNVEPSNRNTQPIAVGIDPGSKREAFTVKSQAHTYLNILTHAVDWVKDAVETRRNMRQTRRGRKTPCRQSRANRLVNKHSLAPSTKARWQWKLRICQWLALMFPITAFVVEDIKARTSKNGRKWNISFSPLEVGKSWFYAQLHQLGILEIKSGLETKELRVMQGLKKTKNKLAEKFEAHNVDSFVLANWYTGGHIQPDNTHLLVVIPLRFHRRQLHRLEHAPGHIRSPYGGTMSLGFKRGSLAIHPKYKLCFIGGSSKGRISLHSIATGKRLCQNAKSQNAKSQDIQFLTYNTWRIRYVA

SEQ ID NO: 237 - protein, 342 aa, unidentified
  REGION 1..342: note = Candidatus Poribacteria bacterium
MLVPVVDKNQHPLMPTKPSRARRWAESGKATPFWKNGIFCVRLNVDPSDIEFQEIAVGVDPGSKKEGFTVKSEAHTYLNVQADAHHNVGKKVEKRRELRRSRRSRKCPNRKNRTNRLANRVRIPAGTRARWDWKLRILDGLSKLYPITHVCVEDIRARTLERVRKWNESFSPLEVGKQWFYTEIEKRWKLFTLQGWETKEIRDRLGLKKSSKKLSDTFAAHCVDSWCLAYHTVGGESIVENQNVFCISPLPIQRRTLQREQPKKGGIRSRYGGTVLAEGLIKHTLVRHVKHGLTRLAGINAKGLFAIYKLDGKRLTTGAKRNSFKILTRLNFNYRNGHSSPN

SEQ ID NO: 238 - protein, 346 aa, Leptolyngbya sp.
MRLIAMQSVPVVDKNQRPLMPTTAQRAERWIKSGKATPFWKRGVFCVRLNVEPSSRFTQPIAVGIDPGSKREAFTVKSATRTYLNMQTHAVDWVKAAEEASTNMRRARRFRKTPCRKPRFNRKRGGIPPSTKARWQWKLRICHWLTKLFPVIAFVVEDIKAKTFKNGRKWNIMFSPLEVGKKWFYSELERIAILHTLQGHETAELRSQLGLKKSKQKLSDKFEAHCVDSWVLANWYTEGHDKPDNTQLIVIIPLRFHRRQLHRFQPGKGAIRSPYGGTISEGFKRGGIARHPKYGIVYIGGASKGRVSLHSLETGKRLTQNAKPSDTKFLSFNSWRFYVPAEQVGG

SEQ ID NO: 239 - protein, 366 aa, Ktedonobacter sp.; identical to SEQ ID NO: 222

SEQ ID NO: 240 - protein, 410 aa, Spirulina sp.; identical to SEQ ID NO: 137

SEQ ID NO: 241 - protein, 365 aa, Scytonema sp.; identical to SEQ ID NO: 29

SEQ ID NO: 242 - protein, 358 aa, Moorea sp.; identical to SEQ ID NO: 62

SEQ ID NO: 243 - protein, 388 aa, Spirulina sp.; identical to SEQ ID NO: 169

SEQ ID NO: 244 - protein, 388 aa, Spirulina sp.; identical to SEQ ID NO: 172

SEQ ID NO: 245 - protein, 364 aa, Anabaena sp.
MRVPVVDKNHQPLMPTTPARARKWVESGKAVKRTSDCGQFYVQLTGEPSGRATQDIVIGIDPGKKFSGIGVQSAKFTLYTAHLILPFQTVRDRMDARRLMRRGRRGRRIDRKVNFLKRAHRQKRFDNRRQGKLPPSIRANRQLELRIVSELCKIYPISEIRYEYVRADVDLTSGRKKARSGKGFSAVMVGQKWMLKQLEQFAPVAKVEGYQTASTRKYLGLTKNSSDKSKSEFNTHAVDGVAIAATAFVEYRQYHTVKVNGGDWFGNVVITFALFKLIRRPPYSRRQLHLMVPAKSGVRRKYGGSTTRHGLRKGDLVTSPKGIGYVSGDTEKQVSVSDANWKRLGQIASSKVQLISRSNGLIVA

SEQ ID NO: 246 - protein, 377 aa, Ktedonobacter sp.; identical to SEQ ID NO: 177

SEQ ID NO: 247 - protein, 416 aa, unidentified
  REGION 1..416: note = Ga0315280_10000490
MVETMQKLTRLSPSGTTCIGLQERQDASLVLPSSEEPLNFTVNHNNNVVNLSLIHIVEGKHDSLEETVIGRVPVVSADGTPLMPCKPSKARKLLENGKATKQWNKLSIFYLRLHFNPKKPSTQPLALGVDCGSKFEGFSVVGTKDTVLNIMSEATTWVKQAVEQRRQMRRARRYRKTRRRQCRSNNRIANTKRIPPSTKARWDTKLRIIRQLEKILPIQTVVVEDIKAVTRKNGKRWNNSFSPIEVGKRYFYARINRKLVVKSGIETKALRETFGLRKLKNKSKTVFETHCVDAWALAASETGAKQLTTRSIYYLVPLRWHRRQLHRLQPEKGGRRKPYGGTCSLGLKRGTLVKHLKHGFCYVGGNLNGKLSLHSVKTGERLPKCAKKEECKILTNLSFRTQLLCPTSRAVPSEAF

SEQ ID NO: 248 - protein, 349 aa, Calothrix sp.; identical to SEQ ID NO: 101

SEQ ID NO: 249 - protein, 365 aa, Microcystis sp.
MARVPVISKDGNPLMPTKPSRARRWIKEGKAIGKFNDLDIFYVQLTTEPSDSKTQPIAIGINPGKLFSGIGVQSSLFTLWKAHLELPFKRVRECLDNRCLMRRGRRKRRINRQLSFNLRAHRQKRFSNRRQGKLAPSIRANRQLELRVVSELTKIYPITDIYFEYVKTDIDLTSSRKGAKSRKGFSPVMVGQKWAIEQLSQLAKVHTRFGWQTSNLRKYLRLEKSKNKAEQSPESHANDGIALACFQFLDYWPFHNSNGHGYDWKGYVKVTNAPFAVIKRPPISRRQLHLMVFSKGGKRRKYGGSTTRHGFRKGDLVSSPKGIGYVSGDTEKQLSVSDANGQRLGQIAVSKIQLIRRSNGLIVSR

SEQ ID NO: 250 - protein, 437 aa, Sulfobacillus sp.; identical to SEQ ID NO: 212

SEQ ID NO: 251 - protein, 361 aa, Thermanaeromonas sp.
MEYGVSRNEISKACALYFSERIPVVSKDGRPLMPCRPAKARKLLSSGKAEPRWSKLGLFYIQLRIDVKSEYNGGGQSFVLAHDPGSRFDGMALGCKFVQLRFMVILPQKVPGKMKNRRELRRGRRYRNCRRRPYRPRSPGPYWIGPTQLAKVLFRLAVVRELCCLFPISHFIVEDVRFNHFRFRHGKHFSTAEIGKTRYYSELRGLGVLVRVEGWQTKLWREGVGLEKVTRKDALILGSHANDAVAMLWGLAGCGVNEGAPFYVLRRPEFARRSLHRQNFQKGGVRPLFGGTSNGDFLRKGDYVEVERAGKVNRGWVCGLPTETTPLVGVMDARGVRIGQFAPRKVRLLQRGHNILWERVI

SEQ ID NO: 252 - protein, 365 aa, Microcystis sp.
MARVPVISKDGKSLMPTKPSRARRWIKEGKAIGKFNDLDIFYVQLIDEPSDSKTQPIAIGIDQGKLFSGIGVQSSLFTLWKAHLELPFKRVKERMDNRCLMRRGRRGRRINRQLPFNLRAHRQKRFLNRRQGKLAPSIRANRQLELRVVSELTKIYPITDIYFEYIKADVDLTSGRKGAKSGKGFSPVMVGQKWAIEQLSQLATVHTRFGWQTSNLRKHLRLEKSKNKAEQSPESHANDGIALACFQFLDYLPFHTSNEHGYDWKGYVKVTNAPFAVIKRPPVSRRQLHLMVFSQGGKRRKYGGSTTRHGFRKGDLISSPKGIGYVSGDTEKQLSVSDANGQRLGQIAVSKIQLIRRSNGLIVSR

SEQ ID NO: 253 - protein, 350 aa, unidentified
  REGION 1..350: note = Oil field metagenome
MIKRVPVVSVDGKPLMPTTPRKARLLVRDGLAEPRRNKLGLFYIRMLRPVGTRTQPFSLAVDPGAKYDGVGVASHKRVELKAMVFLPDDVPQKMEARRNLRRARRYRNTPRRPKRFDNRRRKGYWLAPTQKSKVETRLKVVRELCKIYPIQLIITEDVRYNHYKYRDGKYFSTVEIGKTLTYREYRKLAELKLVEVSDTDAWREKFNLPKLIARKWEQVPETHANDAVAMLMGVTGCKSNPAAPFFVWRRLRYARRSLHRQHFQKGGIRPKFGGTSNGSFFRKGDWVEAEKAGKTYRGWVCGLPTETTKLVGVADADGKRIGQFSPKKVRLLARSTGFSWKEVRPASSPE

SEQ ID NO: 254 - protein, 379 aa, Cyanothece sp.
MYRIPVLSPEGNPLMPTKASRARRWIKEGKAIKKFNKLGQFYVQLIAKLADSKTQPISLGNDPGNNFSGIALQSAKFTLFTAHLELPFKKVQERMDNRRMMRRGRRGRRINRKLPFHLRAHRQKRFNNRKQGKLPPSIRANRQLELKVIQELCKVFPVTDIYFEYVKADVDLTSGRKGARSGKGFSAVMVGQKWMLKQLENLANVHTIYGWQTSNLRKHLRLEKSKDKAEQTPSSHAVDGVALACYQFLEYKAHHSANNHGHSWQGQVLITPCQFMVIKRPPVSRRQLHLMLPSKGGQRRKYGGTITRHGIRKGDFVKAVKANKVFYGWCSGDTARQISVSDFNWKRLGQFTASKVVLLQRSTGLICKQETDFVGATVC

SEQ ID NO: 255 - protein, 379 aa, Crocosphaera sp.
MLRVPVLSPDGTPLMPTKASRVRRWISDGKAVGKFNDLGQFYVQLLVKSSDTKTQSVSVGIDPGKHFSGIGVQSSKYTLFTAHLELPFKKVRERMNNRRMMRRGRRGRRINRKLPFHLRAHRQKRFSNRKQGKLPPSIKANRQLELRVIQQLCKVFPITDIYFEYVKADVDLTSGRKGAKSGKGFSAVMVGQKWMLKQLEKLGNVHTIYGWQTSNLRKHLRLDKSKNKSKQTASSHAVDGVTLACYQFLEYKAHCSGNNHGHIWQGNVTITACQFMVIKRPPISRRQLHLMLPIKGGKRRKYGGTVTRHNIRKGDFVKAIKAGKVFYGWCSGDTAKQVSVSNFDWKRLGQFTASKVVLLQRSTGLICKQEADFVGATVC

SEQ ID NO: 256 - protein, 356 aa, Chlorogloeopsis sp.
MPTKASRVRRWLKKGKARVVHNDLGIFQVQLVQETARTNTQPIAIGIDPGKYYTGIGVQSAKFTLWMAHLQLPFKSVKDRMDQRRMMRRGRRGRRINRSIEFSQRAHRQKRFDNRRQSKLPPSIRANRELELRVVSELSTIYPITTIAYEIVKARGDKGFSPVMVGQKWQLKNLETYAEVKQIEGWETANIRQQLNLQKQKHSKGDAIPATHAVDGVALACSTFIRYGVISSQSMGWKGDVDITLAPFTIIRRPPVSRRQLHLMVPVKGGVRRKYGGTVTRHGLRKGDYVEAIQGNKIYFGWVSGDTEKQISVSDASWKRLGQFTAKKVRLVQRSTGLIVLPTRKMSNLTPSRGQV

SEQ ID NO: 257 - protein, 329 aa, unidentified
  REGION 1..329: note = Cyanobacteria bacterium sp.
MRVPVISSDDQPLMPTKPSRARGWVREGKAKGFFKDLSQYCVQLLEEPTGTDTQSIAVGVDPGKKYSGLGVQSANYTLWKGHLILPFETVKKRMEQPRMMRRGRRGRRINRKLPYKQRAHRQKRFNHRRGHKLPASIRANRQLEYRVVKELTKVYPICAIYYEDVEAKGDKAFTPVMVGEKFMLQWLEKLAPTHTKLGWETASLRRDLKLEKSRNQGESTPASHAVDGIALASHSFRGMEKINGKNYRGQVWQGEVNLTESPFTVLRRPPVSRRQLHLMVEPLGGVRRKYGGTVTRHGFCKGDYVQASRKDQAFFGWVSGDTKSQVSVS

SEQ ID NO: 258 - protein, 383 aa, Spirulina sp.; identical to SEQ ID NO: 12

SEQ ID NO: 259 - protein, 365 aa, Planktothrix sp.; identical to SEQ ID NO: 112

SEQ ID NO: 260 - protein, 365 aa, Microcystis sp.; identical to SEQ ID NO: 252

SEQ ID NO: 261 - protein, 386 aa, unidentified
  REGION 1..386: note = Cyanobacteria bacterium sp.
MQRVPVVSVEGKPLMPTKPSKARKLVRDGRAIGKWNKLNQYYIQLTFTPSGEKTQVISCGIDPGKHYGSVGIQSSKVTLFTSHIFLPFETVKKRMEQRALMRRCRRGRRINRKLPYELRAHRQCRFSNRKKGKLPPSIRANCQLLLRITTELAKVYPISSIFYEYCKADVDLTSGRKKARSGRGFSPVMVGQAWILEQLSNIAPITKKLGWQTSNLRKHLGLEKQKHSKGDITPATQAVDAVTLASFAFIDYLPFENSQGRGHTWKGNITITNAPFFVIRRPPISRRQLHLMVFAKGGKRRKYGGTVTRHGIRKGDLVVAERKGIEYVGWCSGDTKTQVSVSDSNWKRLGQFSRNKTRLLKRSTGLICKQLHGGRRFLPSLIANAI

SEQ ID NO: 262 - protein, 368 aa, Coleofasciculus sp.
MIRVPVLSPDGKPLMPAKASRVRRWLKAGKAKVTHNDLGIFQVQLVNPPSGEETQDIVAGIDPGKLFTGIAIQSAKATLFLAHLNLPFKNVTKRMTQRVMMRRGRRGRRINRKVSFDQRNHRQHRFDNRKGHKIPPSIRANKQLALRVVQELSKVYPFTDVVVETIKAKGDKGFSPAMVGQYWQIEQLEANGYTVHTQEGWHTSNLRQYLGLPKSKNKAESSPAAHAVDGICTAASQFMRYRQIQGISGTFLGSIEVTPCQFAVISRPPVCRRQLHLMIPGKGGKRRGYGGTVTRHGFRKGDYVKAVKADIAYYGYVSGDTKTQVSVSDANWKRIGRFTTSKVQLLQRNTGLVSTVGLSNLTTSSSVV

SEQ ID NO: 263 - protein, 337 aa, unidentified
  REGION 1..337: note = Ga0315284_10003385
MFVPVVDKNNKPLMPTRIGRVKRWVVSGKGTFFWKMHILCVRLNVDPSDDKTQKIAVGIDPGSKREAYTVKSKGHTYLNLLTETIDWIKDSLEVRRNMRKSRRFRKTRIRKCRFLNRHKSKLPPSTKARWQFKENIVKNLKKVFPITDIVVEDICAKTKPGKKKWNTSFSPLEVGKKWFYDQMTKYGHLTIIQGHETKELRDSLSLKKDNNKLSDSFDAHNVDSWVLANFMVGGHEYPDNILIEKLIPLQFHRRQLHALQPVSGGERRNYGSTISMGLKRGSLVRHKECGIVYVGGTMREKMSVHDLRSGKRIARNVVLGDCKFLTFNVTRISPKLK

SEQ ID NO: 264 - protein, 358 aa, Moorea sp.
MLRVPVISPDGKPLMPTKASRARRWLNQGLAIVYPNDLNVFAVQLVNQPSSYQTQDIAIGIDPGKSFSGIAVQSNKATLWTGHLVLPYKKVRVAMDTRRMMRRTRRSRRINRKIPYSQRSHRQKRFSNRRNKKVPPSIRANRQLENRVVRELSLLYPVSAIVCEIVKANGNKGFSPVMVGQYWAISQLEKIAPVTQKQGWETALKREALGLIKDKIDKSRQTVNTHAVDGIALAATHFYRRKNYYHRNGKLSVPKNCEVTNAVFSVIRRAPISRRQLHLLQFSKGAKRRKYGGTTTSHGFRKGDYVEAVKAGKAYRGWVSGETARQVSVSDINWKRIGQFTARKVRLLKRSTGLIVNH

SEQ ID NO: 265 - protein, 337 aa, Microcystis sp.
MARVPVISKDGKPLMPTKPSRARRWIKEGKAIGKFNDLDIFYVQLTDEPSDNKTQPIAIGIDPGKLFSGIGVQSSLFTLWKTHLELPFNLRAHRQKRFSNRKQGKLDPSIKANRQLELRVVSELTKIYPITDIYFEYIKADVDLTSGRKGAKSGKGFSSVMVGQKWTIEQLSKLATVHTRFGWQTSNLRKHLRLEKSKNKAEQSPESHANDGIALACFQFLDYLPFHTSNGHGYDWKGYVKVTNAPFAVIKRPPISRRQLHLMVFSKGGKRRKYGGSTTRHGFRKGDLVSSPKGIGYVSGDTEKKLSVSDTNGQRLGQIAVSKIQLIRRSNGLIVSR

SEQ ID NO: 266 - protein, 343 aa, Pelotomaculum sp.
MITRVPVVGVDGKPLMPTTPRRARLLIRDGLAKRRRNKLGLFYVQMLRPVGTETQPMALAVDPGAKYDGISIASHKQIELKAMVFLPVGVPEKMETRRNLRRARRFRNTPRRPARFDNRRRKGYWLAPTQRSKVECRLKVVRELCKVFPVWLIVTEDVRFNHARSRNGKYFSTVEIGKALTYFEYKKLAELKLVKVSDTDAWRERFGLVKYTERKWEQTPETHANDAVAMLMGITGCEKAVTPFYVWRKLQYARRSLHRQHFQKGSKRPLFGGASNGTFFRKGDWVEAEKAGVKYRGWVCGLPTETTKLVGVADADGKRIGQFSPKKVRLLARSTGFSWITAA

SEQ ID NO: 267 - protein, 391 aa, Hydrocoleum sp.
MLRVPVQNPDGSPAMPTKASRARRWVQEGKATAHWNDAGLYYVRLVAESSGGHTQKITIGCDPGKKYTGIAVQSANFTLYTAHLVLPFDRVKERLGSAVIKQGKIIKNVRGRALQRRARRGRKINRKVPFNQRAHRQKRFDNRKRKGKLPPSIRASREMEIRIITELSKVFPITMIVYELVKADVDLTSGRKGARSGKGFSPVMVGQNWCVKQLQSIAPVKTVYGWQKNNNGTSQIRRYLRLEKIKDKKAQVQKSHAVDGIALAASEFVRYGVTPRKNSDTWGWKGSVNITYCIFRVITRPAYFRRALHFDNAEKGGIRKRKGGTITPFNVRYGDKVMAEKSGKTYIGWVGGFTKTKTKNISVYDHNWKRVGQFSPKKVQLIRRSNKLCVV

SEQ ID NO: 268 - protein, 364 aa, Anabaena sp.; identical to SEQ ID NO: 123

SEQ ID NO: 269 - protein, 338 aa, Caldicellulosiruptor sp.
MRFVPVVDKDGNPLMPTKPSRARRWIKSGKATPFWSKGIFCVRLNIEPSARYKQPVALGIDPGSKMEGYSVKSKAHTYLNIQAYAVTHVKSAVETRRNMRRARRYRKTRRRPVRFNNRKNKDLPPSTKARWQWKLRIVKWLTRIFPITDFVVEDIKAVTKLGQKRWNESFSPLETGKNWFYAELSRLGKVHIKEGRETKQLRESYGLKKTSKKLEETFESHCVDAWCLANWCTGGHVQPDNTELLVIIPLRFHRRQLHMLQFDKGGIRRRYGGTRSLGFKRGSYVKHPKYGLCYVGGHMNGKLSLHDINTGKRFTQQANPDDCKFICFASWRYKYKEL

SEQ ID NO: 270 - protein, 344 aa, unidentified
  REGION 1..344: note = Candidatus Poribacteria bacterium
LLQTLFVPVTTKDGEQLMPTTPPVARHLINIRDATPYWKNGVFCIRLNREPSGRYKQDIAVGVDPGSKKEGFTVKSKSHTYLNVQSDAKTTVGRKIEKRRELRKGRRSRRCPNRKNRMNRLANKARIPAGTRARWAWKLRVLDWLSKLYPITHICVEDIKARSIDRARRWNQSFSPLEVGKEWFYNEIRKRWEFIALQGWQTKELRDRLGLKKSSNKLVESFDAHCVDSWCLAYHTVGGDDVVDNKNIFCISPIEIHRRSLHRQNPQKGGKRPRYGGTTWNGVVKNTLVKHMKYGLTRISGFGKTGISLYSLEGKRICQNAKYTDFKILTRLNFNYKDSLETSS

SEQ ID NO: 271 - protein, 226 aa, Nostoc sp.
LCKAVGKRNKVGVFYVQILRESSGAETQEIVVGTDRGKAFTGIAFQSKLATIVLFHACLPGFYKSKKTMKDRQSVTGKMSKRTELRRTRRGQRINHKVAFKLRNHREKRFSNRRQNKLPPSIKANREMELRILSEMSKIIPISEVRDESCGGDSKRNGFGISPVTVGQEWFRTEASKLAPIKEIDSLDTGKYRTQLGLVKDKKDKSKQTPETHANDAITLASTAFI

SEQ ID NO: 272 - protein, 419 aa, unidentified
  REGION 1..419: note = Ga0315273_10074057
MVDKMRTQTRPSEKAATCGGLRRTSGRLPNPDRFGRTTKCHAGKPAKPAVHGRREILPSVIAGAGVIPQTRVPVVDKAGKPLMPCLAVRARKLLDTGKAVGAWNKLGIFYIRLKVSKEPKNQRLVVGIDPGSKFEGYSVVGTKDTVLNIMSEAPDWVKKAVETRRNMRRARRFRNTRRRECRFDNRLAGTRRLPPSTKSRWDAKLRIVTKLAQIMPLTGAVVEDVKAVTKKGQRRWNVNFSPIEAGKEYLYNGLRGLGLELRLKQGMETKEARDALGLKKIKSKSRPVFSSHCVDSWILAASMSGAKMPTTKNLYYLTPLRLHRRQLHMFEPAKGGLRKRYGGTMSIGIKRGTLVVHLKHGLCYVGGNMDERLSLHSVSTGKRLCQNAKVSDLKTLTRIANNSQFLPALKCGVSLGGFL

SEQ ID NO: 273 - protein, 309 aa, unidentified
  REGION 1..309: note = sediment metagenome
MKVFVVDSEGKPCLPTKPRRAKQLLKQGRAKVRQVVPFIIQLNRKIENPVGSFEVGVDDGAKYVGIAVKNTVTEEVIFRAQLDHRQDISKKVAQRRDYRKARRFRLSYRQPRFDNRTAKNKLAPSIRQRKEAVVRVIKDLRRIINIVKVTVEEIFFNHAKYDWGKFFSLVEVGKKYLREQIESMGLIYEFTKGFITKEFRIALGLGKGHSNDACAIVNSNKIDCIEYFIKPRRAKVWESNPTKTCTEKNGFRHYDLVKVVHRTRGIVVGSIRSLKANCITLRTKFSDNFPVSYNKTRILQRFGGLIYTY

SEQ ID NO: 274 - protein, 365 aa, Microcystis sp.
MARVPVISKDGKPLMPTKPSRARRWIKEGKAIGKFNDLDIFYVQLTDEPSDNKTQPIAIGIDPGKLFSGIGVQSSLFTLWKAHLELPFKRVRERLDNRRLMRKGRRGRRINRQLPFNLRAHRQKRFSNRRQGNELPSIRANRQLELRVVSELNKIYPITDIYFEYIKADVDLTSGRKGAKSGKGFSPVMVGQKWAIEQLSQLATVHTRFGWQTSNLRKHLRLEKSKNKAEQSPESHANDGIALACFQFLDYLPFHNSNGHGYDWKGSVKVTNAPFAVIKRPPISRRQLHLMVFSKGGKRRKYGGSTTRHGFRKGDLVSSPKGIGYVSGDTEKQLSVSDTSGQRLGQIAISKIQLIRRSNGLIVSH

SEQ ID NO: 275 - protein, 365 aa, Microcystis sp.
MARVPVISKDGKPLMPTKPSRARRWIKEGKAIGKFNDLDIFYVQLTDEPSDSKTQPIAIGIDPGKLFSGIGVQSSLFTLWKAHLELPFKRVRERLDNRRLMRRGRRKRRINRQLPFHLRAHRQKRFSNRRQGKLAPSIRANRQLELRVVSELTKIYPITDIYFEYIKADVDLTSGRKGAKSGKGFSSVMVGQKWAIEQLSRLATVHTRFGWQTSNLRKHLRLEKSKNKAEQSPESHANDGIALACFQFLDYLPFHNTNGHGYDWKGSVKVTNASFAVIKRPPISRRQLHLMVFSKGGKRRKYGGSTTRHGFRKGDLVSSPKGIGYVSGDTEKQLSVSDANGQRLGQITVSKIQLIRRSNGLIVSH

SEQ ID NO: 276 - protein, 364 aa, Mastigocladus sp.
MFVPVVDQNSRTLMPTTPSRARRWVKSGKATPFFKKGVFCVRLNQEPSNRSTQPIAVGVDPGSKREGFTVKSQSHTYLNIQTHAVDWVKDHVEVRRNMRRARRFRNTPCRQNRKNRLVNKQKLPPSTKARWQWKLRICKWLTLIFPVSTFVVEDIKAKTLIGAKKWNVMFSPLEVGKKWFYSELETIANLETRTGNDTYEMPQNLGLKKSKNKLSNKFDAHCVDSWVLANWFVGGHQKPENTQLIEIVPLEFHRRQLHRLQHSAGHTRSRYGGTISAGFKRGSVVRHPKFGFCYVGGWQESPTKKDPNRKTISLHSFATGKRLTQNATPKDCIFKAYGSWRTSTATKGATAVLGFPQVVQVAFA

SEQ ID NO: 277 - protein, 388 aa, Symploca sp.
MLRVPVISKSGKPLMPTKASRARRWLREGRAIIFPNDLNIFAVQLLTETGVETQPISVGVDPGKMYSGVGVQSAKATLWMAHLVLPFKTITERMEQRRIMRRARRGRRINRKIPYRQRCHRQKRFNNRRQSKLPPSIRANKQLELRVVKELMQVYPISTIHYELVMADVDKTSGRKGAKSGVGFSPVMVGQKQMLRWLSNLANVVTHKGWQKDCNGTSQLRKWLGLEKDKKNKANQIPATHAVDGVTLAAFEFTQWKEWHTSKSKHGAWVGDVCITPATFSVVRRPPISRRQLHLCLPAKGGNRRKYGGSVTRHGSRKGDLVIAEKAGKSYRGWASGDTKTKVSVSDGNWKRLGQFSAKKVQLLQPRVGLIVTPVVGLSKLTPSRGQF

SEQ ID NO: 278 - protein, 348 aa, Brasilonema sp.
MFVPVVDPNNHPMMPTTPSRAKRWIKSGKATPFFKKGVFCVRLNQEPSNRNTQPVAVGVDPGSKREGYTVKSQAHTYLNIQTHAIDWVKDHVEVRRNMRRARRFRNTPCRQNRKNRLVNKQKLPPSTKARWQWKLRICKWLALMFPISTFVVEDIKAKTWKGSRKWNTMFSPLEVGKKWFYSELKRIASLETRTGNDTYEMRQSLGLKKSKNKLSNKFDAHCVDSWVLANWFVNGHLKPENTRLIEIIPLEFHRRQLHRLQHSVGHIRTRYGGTVSAGFKRGSVIKHPKFGFCYVGGWQESPTKKDPDRKTISLHSLETGKRLTQSAIPIDCRFKSYGSWRTTAVKTA

SEQ ID NO: 279 - protein, 365 aa, Microcystis sp.
MARVPVISKDGKPLMPTKPSRARRWIKEGKAIGKFNDLGIFYVQLTTESSNNKTQPIAIGIDQGKLFSGIGVQSSLFTLWKAHLELPFKRVRERMDNRRLMRRGRRKRRINRQLSFNLRAHRQQRFSNRRQGKLAPSIRANRQLELRVVSELTKIYPITDIYFEYIKADIDLTSGRKGAKSGKGFSSVMVGQKWAIEQLSQLATVHTRFGWQTSNLRKYLGLEKSKNKAEQSPESHANDGIALACFQFLDYWPFHNSNSHGYDWKGFVEVTNAPFAVIKRPPISRRQLHLMVFSKGGKRRKYGGSTTRHGFRKGDLVSSPKGIGYVSGDTEKQLSVSDTNGQRLGQIAVSKIQLIRRSNGLIVSR

SEQ ID NO: 280 - protein, 364 aa, Planktothrix sp.; identical to SEQ ID NO: 41

SEQ ID NO: 281 - protein, 365 aa, Calothrix sp.; identical to SEQ ID NO: 227

SEQ ID NO: 282 - protein, 348 aa, Methanoculleus sp.
MRVPVMDTHRTPLMPTTPVRARQLLKQGKAKPYWNKLGIFCIILTYEVQPDNQPLVVGVDPGSSFEGWSVVGTKETVLNGMSEAPKHVKKAVETRRTLRRARRHRNCWRRPARFDNRLRNKISLPPSTFARWNAKIRILDQFQKILPISAVVVEDVAAVTKKHCTRWNTNFSPLEVGKRWFYRTIRDHGFDLYLRTGYETKALRDRFGLKKTNQKSKPVFATHAVDAWVMAADVSGAECPTERGLYYWTPIRLHRRQLHRLQPEKGGIRKPYGGTRSLGLTRGTLVRHITHGLTYIGGTLKERLSLHGVVTGKRVTQRAKVEDCTILTRIAWRTTRYAGIGRRHSSPA

SEQ ID NO: 283 - protein, 336 aa, unidentified
  REGION 1..336: note = Ga0315284_10000757
MFVPVVDKNNKPLMPTRIGRAKRWVISGKGTFFWKTYRLCVRLNVDPSDTETQKVVVGIDPGSKREAYTVKSKGHTYLNILSKTVDWVKDALEVRRNMRRVRRFRNCRRRECRFSNRHEPKLPPSTKARWQLKVNVVKNLFKVLPITDIIVEDVSAKTKPGKRKWNESFSPLEVGKKWFYNEIAKLGNLTTKQGYETKELRCSLNLKKDKNKLLDSFYSHNVDAWVLANNLVGGHSQPDNIFIEKFIPLQFHRRQLHVFQPDVGGKRKNYGSTISMGLKRGSLVRHKKYGVVYIGGTMNGRISVHDVSVGKRLARNVKVCDCKFLTFCVIRKENVI

SEQ ID NO: 284 - protein, 351 aa, Synechococcus sp.
LSSWLAVPNQHFYHLATLALPLEAEPSGRATQPIAVGIDPGKMFSGVSVQSAKATLFTAHLLLPFKRVKDRMESRAMMRRGRRSRRIDRSLPFELRNHRQKRFDNRKQKKVPPSIKANRQLELRVVTELSQLFPISKIVVEYVKARTKKGCSFSPVQVGQKWAIEQLKKLASVRTLYGWQTATMRDHLGLSKSKNKAEQTPQSHAVDGVALAASEFTEYRKYHRNDSRGADWSGLVNITSANFVVIHRPPVSRRQLHLMVPAKGGNRRKYGGTVTRHGFRKGDLVIAEKKGIQSIGWVSGDTKNQVSVSDFDWKRIAQFTASKVQLLYRSTGLLVNCPQRLSVRNASSVAA

SEQ ID NO: 285 - protein, 368 aa, Westiellopsis sp.
MLRVPVLSPSGKPLMSTKASRARRWLKEGKARIVYNDLGIFQVQLIRCPRTQNTQPIAVGIDPGKLYTGVGVQSAKFTLWMAHLQLPFKTVKDRMEQRAMMRRGRRGRRINRKVVFSKRAHRQKRFDNRRACKLPPSIRANRQLELRVVDELSLIYPITTIAYEIVKARGNKGFSPVMVGQRWQLENLETYAKVKQVEGWQSANIRQQLGLHKQKHSKGDAIPATHAVDGVALSCSAFIQYGIIDPQTMAWKGDVAITPAPFTVIRRPPVSRRQLHLMVPAKGGITRKYGGTVTRHGLRKGDCVQATQGNKTYFGWVSGDTEKQVSVSDASWKRLGQFTVKKVQLVQRSTGLIVLPTRKLSNLTPSRG

SEQ ID NO: 286 - protein, 369 aa, Planktothrix sp.; identical to SEQ ID NO: 147

SEQ ID NO: 287 - protein, 349 aa, Calothrix sp.; identical to SEQ ID NO: 101

SEQ ID NO: 288 - protein, 370 aa, Anabaena sp.
MRVPVISVDNIPLMPTKPSRARRWIKEGKAIGKFNKLGVFYVQLKSEPSNTKAQEIVIGLDPGKMFSGIAVQTKKYTLQMLHLVLPFKTVKDRMEQRAMMRRSRRGRRIKRKLPYTQRSHRQARFDNRRGSKLPPSIRANKDLEYRTITLLCDIYPVKTIVVEEVEAGGNKSFSPVMVGQRYQINRLSELANVTLKKGWETSNLRKYLGLHKEKSEKSLQIPETHAVDAVTLASSEFVKYQTWNDIKNHGASWVGNVTITRSQFTILRRPPISRRQLHLMVFSSCGNRRKYGGTTTRHGFRKGDFVEATQGQKTFFGWVSGDTEKQVSVSDCNWKRLGQCTAKKVRLIQPNTGLIVFSTRKMFNLTALSH

SEQ ID NO: 289 - protein, 370 aa, Aphanizomenon sp.; identical to SEQ ID NO: 288

SEQ ID NO: 290 - protein, 377 aa, Symploca sp.
MYRVPVISKFGKPLMPTKPSRARRWLKEGKARIYRNDLQQFAIQLTIDADTKTQPIAVGIDPGKLFTGIGVQSVKATLFTAHLELPFKSVTKRMSDRRMMRRGRRGRRINRKLPYNQRSHRQVRFNNRKARKLPPSIRSNRQLEYRVVKELTELFPVSGIVYEYIKAKGNKGFSPAMVGQKVMIEEWLPQLAPVTTRYGWETSNLRQYLGLTKDKSNKANQTPATHAVDGIALAAHYFLRWKELRGKYGYWQGICQVTPAPFLVVKRPPVSRRQLHLMVFAKGGKRRKYGATVTCHGLRKGDFVETERKGVKYRGWVSGDTKTQVSVSDFNSKRLGQFSVKKTKLLRRSTGLICKPLVGGAAFLPSLKARGDRREER

SEQ ID NO: 291 - protein, 367 aa, cyanobacterium sp.
VNRIPVLAPDGTPFMPTTPSRCRRWLRDGKAVVVHNDLSLFCIQLVAEPSARNTQDVVAAIDPGKLFSGVGVQSSRSTLFLAHLILPFKSVTQKMTARRILRRARRGRRINRKLPYKLRSHRQKRFDNRKQKKLPPSIRANKQLELRVVKELLKIFPVSHIRYEVIKARTENGKGKGFSPAMVGQKIMLEWLEQLRPITTQEGWQTSILRQQLGLAKDKTDKSAQKPETHANDAIALAASHFMSFERFHTVNTRGHRWVGQVTITPAPFRIISRPNLYRRQLHFENTEKGGTRKRKGGTVTPFSFRSGDKVRAEKVGVAYVGWIGGYTLTSKTKNVSVYDHNWRRIGQFSPNKVELLQRSTRLCVTA

SEQ ID NO: 292 - protein, 410 aa, Spirulina sp.; identical to SEQ ID NO: 178

SEQ ID NO: 293 - protein, 422 aa, unidentified
  REGION 1..422: note = Ga0315280_10053983
MVVAMKVLTSLSKEPSAGRGQCATPVGLEARQGASLALPSAGEPLNPTPLEEAKLHGHWRREIHPVIEQEWGNPRVSVVSANGIPLMPCTPAKARILIKQGKAKPRWIKLGIFYIQLTFNPKNPATQPIAVGVDPGSKFEGTSVVGTKDTVLNIMSETVDWVKGELEQRRRMRRTRRYRKTRSRKCRGDNRHSEGRVPPSTRARWDAKLRIISQLQRILPISTAVVEDVKAETRKNHRRWNASFSPLEQGKRYFYSELRKSFQLITKEGWETEQLRKNYGLEKVGDKSRPVFESHCVDAWALATSQTGAEHPTTRALYYLVQLRWHRRQLHRLEPDKGGMRRRYGGTVSLGLKRGTLVKHVKYGLCYIGGNLRDRFSLHSLKTGGRITQNAERGDLKILTRITFRTQFLPALKDGVSLGDFR

SEQ ID NO: 294 - protein, 382 aa, Leptolyngbya sp.
MRVPVVSKEGVPLMPTKPSRVRRWLKERKAVKKWSDVGVFYVRLTVDPSNTQTQEVAVGVDPGKHFSGVAVQSAKATLFMAHLILPFETVKKRMEQRRTMRRTRRSRRINRNVPFKFRNHRSSRFNNRCQNKLPPSIRANRQLELRVVRELAAIFPISTIVWEYVRADVDLTSGRRKARSGKGFSPVMVGQRWAIREMEEIAPVVQLQGWKTANLRRELGLVKSGNKDDASPESHAVDGIALASSQFVRYESFHGTNVRGHRWKGSVCITPALFRVIRRPPICRRQLHLLQPAKGGTRRKYGGTVTRHGFRKGDFVRASRAGRQYLGWVSGDNARQVSVSDINWKRLGQFSASKVQLLAPNTNLLVLGTSNPTRPAFCSSRA

SEQ ID NO: 295 - protein, 374 aa, Moorea sp.
MLRVPVISPDGRPLMPTKASRARRWINKGLAVVYQNDLNVFAVQLVNKPSGEETQDIAVGVDPGKLFSGIAVQSNKTTLWTGHLVLPYKKVRDSAEPTLRERMDTRRMMRSRSVGFAERTRRSRRINRKVRYSQRSHRQKRFSNRREKKVPPSIRANRQLEQRVIKELSLLYPLRVIVYEVVKARGSKGFSPVMVGQYWSISQLERIAPVIQKQGWETALKREALGLVKDKADKSRLSVNTHAVDGIALAATHFFRRKNYYHSKGKLSVPRNCDVTDATFSVIKRAPISRRQLHLLQFYKGGKRRKYGGTTTSHGFRKGDYVEAVKAGKQARGWVSGETARQVSVSDINWKRIGQFTARKVRLLKRSTGLIVNH

SEQ ID NO: 296 - protein, 365 aa, Microcystis sp.
MARVPVISKDGKPLMPTKPSRARRWIKEGKAIGKFNDLDIFYVQLTDEPSDSKTQPIAIGIDQGKLFSGIGVQSSLFTLWKGHLELPFKRVRERIDNRCLMRRGRRKRRINRQLSFNLRAHRQKRFSNRRQGKLAPSIRANRQLELRVVSELTKIYPITDIYFEYIKADIDLTSGRKGAKSGKGFSSVMVGQKWAIEQLSQLATVHTRLGWQTSNLRKYLRLEKSKNKAEQSPESHANDGIALACFQFLDYWPFHNSNGHGYDWKGYVKVTNAPFAVIKRPPVSRRQLHLMVFSKGGKRRKYGGSTTRHGFRKGDLVSSPKGIGYVSGDTEKQLSVSDTNGQRLGQIAVSKIQLIRRSNGLIVSH

SEQ ID NO: 297 - protein, 368 aa, Westiellopsis sp.; identical to SEQ ID NO: 285

SEQ ID NO: 298 - protein, 340 aa, unidentified
  REGION 1..340: note = Candidatus Poribacteria bacterium
MFVPVKSKTGKPLMPTSPPVARHLVKSGKATPYWNNGIFCIRLNSETPEYTQEIAVGVDPGSKKEGFTVKSESHTYLNVQADAHNKVGKKVKKRRELRRSRRSRKCPNRKNRTNRLANKERIPAGTRARWDWKLRVLDWLSRLYPITHVCVEDIKARTIERAKKWNASFSPLEVGKQWFYTQVRERWELLTLQGWETKEIRDRLDMKKSSDKLSETFNAHCVDSWCLAYHTVGGVSIPDNTDIFCISPIPIRRRELHRQNPQKGGNRPRYGGTVCLGIAKNTLVKHVKQGLLRVTGFDKGGLNLSELSSTKRIVRTAKPGTYRVLRKLNFRYKDGNSPPS

SEQ ID NO: 299 - protein, 351 aa, unidentified; identical to SEQ ID NO: 180
  REGION 1..351: note = Oscillatoriales cyanobacterium

SEQ ID NO: 300 - protein, 353 aa, Desulfovirgula sp.
MSTSITRVPVVGVDGRPLMPTTPRKARLLIRDGLAVPRRNKLGLFYIQMLRPVGTRTQPVALAVDPGAKYDGVAVASHRRVELRAMVFLPDDVPRKMETRRNLRRARRYRKTPRRPARFDNRRRKGYWLAPTQRFKVEARLKVVRELCRIYPVQLIVTEDVRFNHARDRNGKYFSTVEIGKTLTYREYRKLAELRLVEVSETDAWRERFGLEKRTERKCEQVPETHANDAAAMLMGVTGCAHNPAAPFFVWRRLRYARRSLFRQNPQKDGVRPRFGGTANGGFFRKGDWVEAEKAGKVYRGWVCGLPTETTKLVGVADADGKRIGQFSPKKVRLLARSTGFSWKEVAAHSSPE

SEQ ID NO: 301 - protein, 371 aa, Phormidesmis sp.
MRIPVQNPDGTPAMPTKPARARKWLEQGTAVKRWSDTGVFYVQLVAEPSGTKTQPIVVGIDPGQLYSGIGVQSAKATLFMAHLVLPFETVKKRMGQRAMMRRTRRGRRINRNVLFVERNHREKRFDNRVGRKVPPSIKANRQLELRVVTELCRILPIAKIVYEYVKARGNKGFSPVMVGQRVMLDWLEKLAPVTTILGWETANIRNQLHLEKTKNKKAQTPAAHAVDGVTLACSEFISYEKYHRYGEDGAMWKGAVQLTESLFKVIRRPPVSRRQLHLFQPAKGGKRRAYGGTVTRHGLRKGDLVSAEMGGRQYTGWVSGDTAKQVSVSDINWKRLGQFTASKVQLIQRSTGLLASGASSPTQPALIPPTA

SEQ ID NO: 302 - protein, 375 aa, unidentified
  REGION 1..375: note = Ga0315273_10097322
MRLKTTKAVGRGSPSDVRNVPLVPFQSSAESRSGNREEQVFGLVPVVDAQNHPLSPCKSSVVRRLIGVGSATPFFKKGIFAIRLNKEVKDIHAKRVVMSIDPGSKRTGITVATEENVILNIQCNAPDWVKGKVETRKNYRRSRRARNTPYRKCRFNREIGCLPPSTKSRWGAHLRILDQLRKIIPITDIVIEDIKAKTRKGSKKWNISFSPLEVGKQYFESEIQKRELKLYKFQGFETKEHRDYRGFKKSSNKLEEKWGTHCVDSHCLSEMFFGNLEPVKKMYVLNFIRFNRRELHQGYHNGIRKLYGSTRSMGINRGTLVNHPKYGLSYVGGTSKSFISLHNVETGKRLSQSVKKSNLIILTKQSWRISNSSPT

SEQ ID NO: 303 - protein, 365 aa, Microcystis sp.
MARVPVISKDGKPLMPTKPSRARRWIKEGKAIGKFNDLDIFYVQLTDEPSDSKTQPIAIGIDPGKLFSGIGVQSSLFTLWKAHLELPFKRVKERMDNRRLMRRGRRKRRINRQLSFNLRAHRQKRFSNRRTGKLAPSIRANRQLELRVVSELTKIYPITDIYFEYIKADIDLTSGRKGAKSGKGFSSVMVGQKWAIEQLSQLATVHTRFGWQTSNLRKHLRLEKSKNKAEQSPESHANDGIALACFQFLDYWPFHASNSHGYDWKGSVKVTNAPFAVIKRPPISRRQLHLMVFSKGGKRRKYGGSTTRHGFRKGDLVSSPKGIGYVSGDTEKQLSVSDTSWKRLGQIAVSKIQLIRRSNGLIVSR

SEQ ID NO: 304 - protein, 365 aa, Microcystis sp.
  VARIANT 365: note = Xaa can be any naturally occurring amino acid
MARVPVISKDGKPLMPTKPSRARRWIKEGKAIGKFNDLGIFYVQLIDEPSDSKTQPIAIGIDPGKLFSGIGVQSSLFTLWKAHLELPFKRVRERMDNRCLMRRGRRGRRINRQLPFNLRAHRQKRFLNRRQGKLAPSIRANRQLELRVVSELTKIYPITDIYFEYIKADVDLTSRRKGAKSGKGFSSVMVGQKWAIEQLSQLATVHTRFGWQTSNLRKYLRLEKSKNKAEQSPESHANDGIALACFQFLDYLPFHNSNGHGYDWKGSVKVTNAPFAVIKRPPISRRQLHLMVFSKGGKRRKYGGSTTRHGFRKGDLVSSPKGIGYVSGDTEKQLSVSDTSWKRLGQIAVSKIQLIRRSNGLIVSX

SEQ ID NO: 305 - protein, 346 aa, unidentified
  REGION 1..346: note = Ga0315284_10006947
MVPVLDSNKMPLMPCTEKRARKFMEKGDAKPYWKNGIFCIILQREPSARNYQEVVIGIDPGSKRTGITTTTEKRVICNQLFDAPSEVKKKVEFRKILRRSRRSRKTPYRKCRSNRKIGGIPPSTKARWGAHLRVIDFWEKLIPITVVSIEDIKAESKKHCRKWNKNFSPLEVGKAWFEKEVITRGYNFYKFQGFETQSQRIHRGFKKTSQKIRDTWDAHNVDSHCLCELALGNIKPFFGILKCEFFKWSRRQIHVSNPKKDGIRKQYGTTRSLGLNRGTLVKHKKLGLTYVGGTSDGKISLHDIKSGKRLTQDAKKEDCKILTNLRWRTRIPPMVKAMGLLRGKNL

SEQ ID NO: 306 - protein, 428 aa, unidentified
  REGION 1..428: note = Ga0373630_0001176
MVVVMQTLTSLSEELRIGGRCAAPEELEGRPDASPARTSSAEPLNATATGNSSIRSSGIGEGRLLKDPGHRDAIVSREKERVPVVSADGTPLMPCKPAKARKLLRDGKALKKWNRLGIFYVRLNFDPKKPAYQPITIGIDPGSKFEGFSVVGTKDTVHNIMSEAVDWVKKALEQRRQMRRARRYRKTRCRECRGDNRLKRSRLPPSTKARWDAKLRIISQLQRILPISAAVVEDVKAETRRNHRRWNANFSPLEQGKQHFYSELRKSFQLITKEGWETEQLRKNYGLEKIEDKSRPIFESHCADAWALAASQTGAEHPTTRALYYLVPLRWHRRQLHRLQPARGGIRRREGGTVSLGLKRGTLVRHIRYGLCYIGGNMKERLSLHSFRTGRRLTQNAEREEFTILTRVAFRTQFLPPMKGVGILGGVR

SEQ ID NO: 307 - protein, 407 aa, Acaryochloris sp.
MLNLVVLGTYNSQEDYLKLQLRVPVISAEGKPLMPTKPSRARRMVRDGVAVGKWNDAGLYYIQLTKPPSDKQRQPIHLGCDPGKSYTGIAVQSAKFTLYTAHLVLPFQRVKERLGAAVIKGGKAIKNVRGRALQRRVRRGRRINRSVLFQFRAHRQKRFNNRRQPKLAPSIKASRHMEIRVISELAKIFPLTSIAYEVVKADVDLTSGRKGARSGKGFSPVMAAQYWAMKQLESIAPVVRRYGWQSDGNGTSQVRKHLGLIKIKDKKAQTPEAHAVDGIALAASQFTRYQATHIDAMDWTGAVEVTPAPFKVITRPGYFRRALHFDNPSTGGIRKRKGGTVTPFGYRAGDKVQVATKGQILTGWVGGFTDTEKSKKVSVYDVNWKRLGQYGLKQISMIRRSNKLCVS

SEQ ID NO: 308 - protein, 335 aa, unidentified
  REGION 1..335: note = Ga0315294_10064742
MVPVVDKQQKPLMPCSEKRARQMVISRKATPFWKKGVFCIRLNVEPSARNLQQVVVGIDPGSKKEGLTVKSKAHTYLNVQADAITWVKEHVKLRRIMRKARRHRKTPYRECRNNRTMNCLPPSTKARWQWKLRLITWFSEMYPITDFIVEDANAITKKNCSKWNGNFSPIKIGKNWFYSQIKKFGNLSLRKGWDTKTLRDKGGLGKSSNKMRDSFDSHCVDSWVLANEIAQGHTKPENKRVLCVVPLRFHRRQLHRIVPSKGGKRPSYGGTRSLGLKRGSLVQNPKYGLAYVGGSSKNRISLHSLRDGKRLSTSVKVSDCKVLSFGGTRAYWAEV

SEQ ID NO: 309 - skipped

SEQ ID NO: 310 - protein, 379 aa, Crocosphaera sp.
MLRVPVLSPKGKPLMPTKPSRARRWIKEGKAIKRFNNLGQFYVQLLVEPLNSKTQPISCGLDPGKHFSGVAIQSAKFTLFTAHLELPFKKVRERMDNRRMMRRGRRGRRINRKLPFHLRAHRQKRFNNRKQGKLPPSIRANRQLESRVVQELCKVFPVTDIYFEYVKADLDLTSGRKGAKSGKGFSAVMVGQKWMLKQLAKLGNVHTISGWQTSNLRKHLRLEKSKNKSEQTASSHAVDGIALACYQFLEYKSHHSLNNHGRSWQGNVTITPCQFMVIKRPPISRRQLHLMLPSKGGKRRKYGGTITRHGIRKGDFVKAKKAGKVFYGWCSGDTAKQVSVSDFNWKRLGQFTASKVVLLQRSTGLIGKQEADFVGATAC

SEQ ID NO: 311 - protein, 421 aa, unidentified
  REGION 1..421: note = Ga0373629_0115667
MVETMQTLTRRLGESRVSGVKGYKHDRMRDLVLSSASEPLNGTATVSSSLSLPCSVEGHKTPKGGRISPTLKVPVVGIDGKPLMPTTPQRARKLLKDGVAEKRWNKLGQFYIQMLRRVGIEKQPVCLAEDPGSKWDGVTVVSKESVLTCAMLVLPSKVAEKLEQRRRMRRARRYRNTPRRAKRFDNRRRPNGWIAPSQKAKVDFRIEIVDELCKIYPINQFAAEDVRFNHYMKRWGKHFSTVEIGKAEFYKHLKELGELTLYMGIETAELRKKFGLSKNPVKKELSWDTHAVDAIAIGCTELSCENPYPPEFWVWKRFEYARRQLHRLEPDKGGIRRRYGGSWSISPFRKGDVVQYQNGLARVGGFMDDLSLHRFSLANKRFTQTAKLGECKRLFNQQIFSKYENPQFLPPINGVGFLGGF

SEQ ID NO: 312 - protein, 322 aa, unidentified
  REGION 1..322: note = Ga0315281_10085784
VAEKLEQRREMRRARRYRKAPRCPKRFDNRRRPEGWIAPSQKSKVDFRTKVVDELRKLYPVSRFAVEDVKFNHYRKRWGKYFSTVEIGKAAFYKHLRKLGDLGLYTGVQTAEWRGKLSLPKNSRKNSLIWDTHAVDAIAIGCADLGCENPYPPEFWVWKRFEYTHRQLHRLEPDKGGVRRRYGGSWSIPPFRKGDVVSWRDRLARVGGFMGDGVSLHSFGLRNKRFTQTAKIEECTRLYKRCRKPTPFMGGMNAPEGFWVRMAVGELGCEPTNTDCILHGNKKTSYSTSSPSAVISTTAFSSSVRRHTKLRGRHYGRDSSSR

SEQ ID NO: 313 - protein, 374 aa, unidentified
  REGION 1..374: note = Ga0315284_10138768
MRLKTTKAVGRGSSSDVRNVPLVPFQSSAESRSGNREGFLVPVVDSNNNPQFPCKCTVAASLIKVGKAIPFFKKGIFAIRLNKAIKDSHEKRIVMSIDPGSKRTGITVATEENVILNIQCNAPDWVKGKVETRREYRKSRRSRNTPYRKCRFNRDIGVGWIPPSTKSRWGAHLRILDQLRKIIPITDIVIEDIKAKTRKGSKKWNTSFSPLEVGKTYFESEIQKRELKLYKFQGFETKEHRNYRGFKKSSNKLEEKWETHCVDSHCLSEMFFGDLEPVKKIYLLNFLRFNRRELHQGYHNGIRKLYGSTRSEGINRGTLVNHLKYGLSYVGGTSKSLISLHNVKTGKRLSQNVKKSNLTILTKQSWRISNSSPT

SEQ ID NO: 314 - protein, 423 aa, unidentified
  REGION 1..423: note = Ga0315280_10000925
MVVAKQILTRRLDLQGRVSGVEGYKHGRVQDLALSSAPEPLNGMAARNGDLILPCNVEGHSTLTGGPVIGRVPVASLSGKLLMPCKPSKARKLLKKGLAEKHWNKLSMFYLQLKFDPKSELNRNQQVCLAVDPGSKWDGVAVVSKNGVLTCAMLVLPSKVAEKLEQRREMRRARRYRKTPRRAKRFDNRRRPDGWIAPSQRAKVDFRIKIIEEVCELYPVSRFAVEDVRFNHYKKRWGKYFSTVEIGKARFYNHLRKHGPLTLYPGVETSEHRERLGLPKNPVKRELSWDTHAVDAVAIGCAESGCKNPYPPEFWVWKRFEYARRQLHRLEPDEGGVRRRYGGSWSIPPFKKGDVIQYQGRLARVGGFMDDTISLHSFGLRNKRLTQNADPAKCTRLFNQQVFSKSEQPQLLPTLTGGVSLGV

SEQ ID NO: 315 - protein, 245 aa, Synechococcus sp.
VTWVKEHVEQRRQMRRTRRYRKTPCRQPRSNRARGGLPPSTKARWQWKLRLASWLIKLFPVTTFVVEDIQAKTKGQRRWDTSFSPLEVGKQWFYRQLSELGQVLTCSGWATKQMRDALGLKKTNKKTAEVFKAHCVDAWVLANSAVGGHRLPDNKRMLFLAPLRFHRRQLHRLQPDKKGRRTPYGGTLSLGLKRGSLVRHPKWGLAFVGGSSGNKLSLHRLEDGKRLTQNARKADVRHLSFCSWR

SEQ ID NO: 316 - protein, 339 aa, Synechococcus sp.
MYTLCKEAYRMFVPVVDRNQQPLMPTTPARARRWIKAGKATPFWKKGVFCVRLNVEPSDRKVQPIAVGIDPGSKKEGWSVKSAAHTYLNIQADAVTWVREHVEQRRNMRRSRRYRKTPCRQPRSNRARGGLPPSTKARWQWKLRLARWLVRLFPVTTFVVEDIQAKTKGQRRWDTSFSPLEVGKRWFREQLSKLGQVLTCSGWETKQMRDALTLKKTSKKTAEVFETHCVDAWVLANSVTGGHKLPDNKRMLFLVPLRFHRRQLHRLQPDKKGRRTPYGGTLSLGCKRGSLVRHRRWGLAFVGGSSGNKLSLHRLEDGKRLTQNARKADVRHLSFCSWR

SEQ ID NO: 317 - protein, 365 aa, Microcystis sp.; identical to SEQ ID NO: 170

SEQ ID NO: 318 - protein, 339 aa, unidentified
  REGION 1..339: note = Candidatus Poribacteria bacterium
MNFVPVKSKEGERLMPTTPTRAGMMIKCGDATPYWDHGVFCIRLNREPSKRFKQEIVVGVDPGSKKEGFTVKSEAHTYLNIQADAHNGVGKKVEKRSRLRRGRRSRKCPNRKQRTNRMANKTRMPAGTRARWNWKLRILDWLSKLYPLTHVCVEDIKARTQQYQKKWNTSFSPLEVGKHWFYAEIEKRWKLFTLQGWETKEIRDRLGLKKSSKKLSETFAAHCVDSWCLAHHTIGGVSVPDNTALMCVSPIPIARRELHRQNPEKGGKRPRYGGTTQNGLVKNTLVKHIKYGLTRISGFGKRGISLYDLGGSRVCQNAKTSDFKVLRRLNFTYRNGFSS

SEQ ID NO: 319 - protein, 413 aa, unidentified
  REGION 1..413: note = Ga0315298_1012135
MVVATQKLTSLSPSGTTPTGLEARQGASPALPPAGEPLNPKAGNSLSPVGFGEGKSNPGFRPGEPNRLRVSVVDARGAPLMPCTPARARLLLKKGKALARWNKLGVFYLQLKYAVEPKNQILAVGVDPGSKFEALSVVGTKDTVLNIMHEAVDWVKKALEQRRRMRRARRYRKTRRRKPRGDNRRSKGRVPPSTKARWDAKLRIIAQLKKIMPISNAVVEDVKAVTKKACRGWNGNFSPIEVGKRYFYSKLKAIGLEVTAKSGNETKKFRDSLGLKKIGNKSKPVFESQCIDSWCLAAMVTGAKHPTTKSLYYMVPLRWHRRQLHRLEAEKGGIRRRYGGTVSLGLKKGTLVKHFKYGLCYIGGSLKNRLSLHSLKTGKRITQNAKREDIKILTPIAFRTQFLSATKVGSFLW

SEQ ID NO: 320 - protein, 365 aa, Chlorogloeopsis sp.
MIRVPVLDINGKPMMPTKASRARRWLKEGKAKIVCNDLNIFCIQLLVEPSGYNQQPIALGLDPGKKFTGVGVQSAKFTLFMAHLILPFSDVTKKMSGRLILRRARRGRRINRKVAFCKRAHRQKRFDNRKQNKLPPSIRANKELELRVTKELIKLFPVNQITYEYIKAKGNKGFSPVMVGQKVMLQWLEEIAPTNIQEGWQTSILRQQLGLSKDKKDKSKQTPETHAHDGIALASSNFMRFEKFHATNSRGHHWVGEISITPAPFRIIARPNLFRRQLHFENPVKDIPGNRKRKGGTITPFGFRSGDLVKAEKAGKSYVGWIGGYTQTPKTKNVSVYDHDWFRIGQFSPAKVQLIKRSTKLCVKA

SEQ ID NO: 321 - protein, 421 aa, unidentified; identical to SEQ ID NO: 311
  REGION 1..421: note = Ga0373626_0016898

SEQ ID NO: 322 - protein, 344 aa, Tolypothrix sp.; identical to SEQ ID NO: 59

SEQ ID NO: 323 - protein, 334 aa, Ardenticatenales sp.
MQYVPVVSSTGKPLMPCHAARARQLVRQGRAVRRFNKGIFYIELLDRAEGDVQPLAVGVDPGSKREGFTIKSEAHTYLNVQAEAVDWVGKHVEGRKTLRRGRRYRKTPYRKNRQNRTRGGIPPSTKARWQLKLRVLHWLGALYPISSVVVEDVAAVTKAGQRRWNQSFSPLEVGKAWFYGAVEQMAELWLFKGYQTAEMRQALGLTKSSQKLSTKWEAHCVDSFVLATMVVGGHIEPDNKEMLILVPFQFHRRALHRANPQKGGVRPPYGGTKSLGFKRGSWVKHPKWGVCYVGGTSKGRISLHSLTIGKRLTQSAKPEDCRFLCYASWRVFHP

SEQ ID NO: 324 - protein, 377 aa, Symploca sp.; identical to SEQ ID NO: 290

SEQ ID NO: 325 - protein, 342 aa, unidentified; identical to SEQ ID NO: 16
  REGION 1..342: note = Candidatus Poribacteria bacterium

SEQ ID NO: 326 - protein, 405 aa, unidentified
  REGION 1..405: note = Candidatus Desulfofervidus auxilii
VEANHESSKTKRETRVAKMFQRNLEGRLKAAEPAEGGTSKHAMGVPLACSLCAGQSRSGVHTPRKGGLQQVFVPVVDKNQVPLMPTKPSRARRWIKEDKATPFWKKGVFCVRLNVEPSSRKTEPVVVGIDPGSKKEGFSVKSRAHTYLNLEADAVTWVKEHVKQRRQMRKARRFRKTPCRANRSNRSIGGIPPSTKARWGWKLRICRWLKKLYPITHFVVENIKAWTKRGKRKWNKNFSPLEVGKQWFYRELNRLGHVITKQGFETKEIRGRLNLPKDHWIDAWCLAYSQVGGALPDNRNILGITPLRFHRRQLHALQPSKGGIRRPYGGTISLGFKRGSWVKHPKWSLCYVGGFLKDRLSLHSLVDGKRLTQSAKPEDCKFLTYSSWRVRLLPTLSRGVSAAQI

SEQ ID NO: 327 - protein, 343 aa, unidentified; identical to SEQ ID NO: 193
  REGION 1..343: note = Candidatus Poribacteria bacterium

SEQ ID NO: 328 - protein, 300 aa, Planktothrix sp.; identical to SEQ ID NO: 122

SEQ ID NO: 329 - protein, 365 aa, Microcystis sp.; identical to SEQ ID NO: 249

SEQ ID NO: 330 - protein, 366 aa, Nostoc sp.
MRVSVLNPDGSPAMPTKPSRARRWLKAGKAKVVHNDLNLFCVQLICEPSGYEVQDIALGIDPGKMFTGIGVQSSRFTLFTAHLILPLQAITKKMNGRRILRRARRARRINRKVAFHLRAHRQKRFSNRRQGKLPPSIRANRQMELRVTKELIKHFPVSDIRYEVVKARTEKGKGRGFSPVMVGQKFMFQWLEELCPTVSQEGWQTSTLRRQLGLAKDKGDKSKQIPETHANDGIALAASHFMSYQSFQSSNGRGHHWQGQVTVTKSVFRVISRPNLYRRQLHFENPVSGVTGNRKRKGGTITPFGFRSGDLVRAKKSGKTVLGWIGGYSEATKVVSVYDINWRRYGQFKASKVELLQRSTRLCVSR

SEQ ID NO: 331 - protein, 211 aa, Richelia sp.
MKQTTRIPVISPLGDPLMPTTPARCRKWIKNGKAIPKRNKVGVFYVQLTQKPSSYKLQAIVAGVDRGKCFTGVAFQTKLATLALFHLCLPGFYKSKKSNKDRQSVIGKMAKRQELRRTRRGQRINRKISFKLRNHREKRFSNRRNNKLPPSVKANREMELRLLNEMVTILPISEINDESCGGNSKKNGFGISPVTVGQKWFRNKASKLAAV

SEQ ID NO: 332 - protein, 334 aa, unidentified
  REGION 1..334: note = Candidatus Poribacteria bacterium
MYVPVKSKEGKQLMPTTPPVARHLIKSGKATPYWSNGIFCIRLNYETEEYTQDIAVGVDPGSKKEGFTVKSDAHTYLNVQADAHKDVGKKVEKRRELRRGRRSRKCPNRKNRTNRLAQKKRIPAGTRARWEWKLRILDWLSKLYPITHVCVEDIKARTIERAKKWNQSFSPLEVGKQWFYTEVKKRWSLLTLQGWETKEIRDSLGLKKSKQKLSATFDAHCVDSWCLAYHSVGGASLPDNRDIFCISPIPIRRRELHRQNPQRGGKRPRYGGTMCLGIVKNTLVKHVKHGLLRVTGFDTRGGLNLSEISSCKRVVRGTKSDSFRVLTKLNFQYR

SEQ ID NO: 333 - protein, 337 aa, Arthrospira sp.; identical to SEQ ID NO: 85

SEQ ID NO: 334 - protein, 365 aa, Microcystis sp.
MARVPVISKDGKPLMPTKPSRARRWIKEGKAIGKFNDLDIFYVQLTDEPSDSKTQPIAIGIDPGKLFSGIGVQSSLFTLWKAHLELPFKRVKERMDNRRLMRRGRRKRRINRQLSFNLRAHRQKRFSNRRTGKLAPSIRANRQLELRVVSELTKIYPITDIYFEYIKADIDLTSGRKGAKSGKGFSSVMVGQKWAIEQLSQLATVHTRFGWQTSNLRKHLRLEKSKNKAEQSPESHANDGIALACFQFLDYWPFHASNSHGYDWKGSVKVTNASFAVIKRPPISRRQLHLMVFSKGGKRRKYGGSTTRHGFRKGDLVSSPKGIGYVSGDTEKQLSVSDANWKRLGQITVSKIQLIRRSNGLIVSH

SEQ ID NO: 335 - protein, 365 aa, Microcystis sp.
MARVPVISKDGKPLMPTKPSRARRWIKEGKAIGKFNDLGIFYVQLTDEPSDNKTQPIAIGIDPGKLFSGIGVQSSLFTLWKAHLELPFKRVRERLDNRCLMRRGRRGRRINRQLSFNLRAHRQKRFSNRRTGKLAPSIRANRQLELRVVSELTKIYPITDIYFEYIKADIDLTSGRKGAKSGKGFSSVMVGQKWAIEQLSRLATVHTRFGWQTSNLRKHLRLEKSKNKAEQSPESHANDGIALACFQFLDYWPFHNSNGHGYDWKGYVKVTNAPFAVIKRPPISRRQLHLMVFSTGGKRRKYGGSTTGHGFRKGDLVSSPKGIGYVSGDTEKQLSVSDTNGQRLGQIAVSKIQLIRRSNGLIVSR

SEQ ID NO: 336 - protein, 365 aa, Microcystis sp.
MARVPVISKDGKPLMPTKPSRARRWIKEGKAIGKFNDLGIFYVQLTDEPSDSKTQPIAIGIDPGKLFSGIGVQSSLFTLWKAHLELPFKRVKERMDNRRLMRRGRRGRRINRQLPFNLRAHRQKRFSNRRQGKLSPSIRANRQLELRVVSELTKIYPITDIYFEYIKADIDLTSGRKGAKSGKGFSPVMVGQKWAIEQLSQLATVHTRFGWQTSNLRKHLRLEKSKNKAEQSPESHANDGIALACFQFLDYLPFHTSNGHGYDWKGYVKVTNAPFAVIKRPPVSRRQLHLMVFSKGGKRRKYGGSTTRHGFRKGDLVSSPKGIGYVSGDTEKQLSVSDTSWKRLGQIAVSKIQLIRRSNGLIVSH

SEQ ID NO: 337 - protein, 348 aa, Methanoculleus sp. UBA303; identical to SEQ ID NO: 190

SEQ ID NO: 338 - protein, 368 aa, unidentified
  REGION 1..368: note = metagenome
MNEHERVPVVYKGKSLMPTYWKKAKRLCKEKKGILVKDKVLGWYLKLKVDPKNYDTQSISLGVDPGTMFEGYTLLSDKDSRNFQFNFTRIIKNKRNIRSKSSMRRMYRQIRRSRLRHRPIRELYGRKNPMTCTINYYKSHRENFLLRLLRLYPISVISVENVGYDHRVKPGGSGFSNIELSKHYYFDLIRSLGIRLVLVDPHVTSIIRNSIFNSEVKLSDKSTRSFFSHCVDSFSIAWYTLPGRLTSTSVRVINRSADYVRRSLVQFKSKMKWKKEYYRFKSGSRVQVVTHNSKLRRLRVRVDFSPSYHGPWKYVYNTVFPTKKQFIKRYGGTIVRGNSNFRTSWNNFKSKYLDITGIYKYHTISVVS

SEQ ID NO: 339 - protein, 385 aa, unidentified
  REGION 1..385: note = Cyanobacteria bacterium sp.
MNRTPVVSKDNKPLMPTKPSRARKWVESDRAVGKWSDLGVYYVQLLEEPSGTETQPVVAGLDPGKSYSGVGVQSAKCTLLQLHLILPFARVRARMDQRRLLRRSRRSRRINREVPFKLRNHRQKRFNNRKGKKLAPSIRASRQLEIRVVKEIAAIYPITAIGYEKVRADVDLTSGRKGALSGKGFSPVMIGQKFCISELEKIAPVYVREGWQKDGNGTSQLRTVLGLVKDKQNKSEAKPETHSVDGVALACGYFIQFRRFHSSRGHGKTWKGHVTITNSQFRIITRPGAVKRGKEYGVFRRQLHFEIPSQNGVRKRKGGTITPWGLRVGDLVRATKGKTESIGYIGGYSKVNQVVSLYDWQWRRIGQYSMSKTTLIRRSNGLCVA

SEQ ID NO: 340 - protein, 412 aa, unidentified
  REGION 1..412: note = Ga0315277_10000379
MYKQKPKTTRNGLQALQDAPLILNPAEEPLNSMSIENSSNVNSPADGSMPVSHWRSGYNSQSGARLSGHSVFVLDVNGKPLTPCKPSKARKLLKGNQAKPIWNKFGLFGIQMLVETRKETPKSVLGVDFGTKFEGYSIVIGSENNLSVMWKLPDKKKIVRKLEERSQLRRTRRSRNCRRRECRSENREKDGFIAPSQLMIVQSRLKAIREFFKCYPVTNVSMEDVRFNYRDKRWGKNFSTIDIGKKMINKWIQEHVHLKLFRGVDTQNCREKYGYSKSSNKGAETFNSHCSDALAIAADLYMQEHIEPGPFVVVDDTYRPVRRQLHYMQYSKGNVRRPYSTGNFKGIRKGTICNLGQICGGEIDSNRVYIRDWDNKRTKIVQSKIQWLSHQFKTNIQFIPGLNSLVSMAVIS

SEQ ID NO: 341 - protein, 365 aa, Microcystis sp.; identical to SEQ ID NO: 296

SEQ ID NO: 342 - protein, 365 aa, Microcystis sp.; identical to SEQ ID NO: 336

SEQ ID NO: 343 - protein, 425 aa, unidentified
  REGION 1..425: note = Ga0373630_0073123
MVVTMQTLTRRLGSRSRVSGVDGYKNARVRDLALDNSLEPLNSAVTKNGSLSLPCNVEGHSTQTGEPVIGRVPVVSADGTPLMPCKPSKARKLLELGLAEKHWNKLGQFYLQLKFQPKSDLNVNQQICLAVDPGSKWDGLTVVSKEVVVTSGMLALPSKVAEKLTQRREMRRARRYRKTPRRAKRFDNRRRRDGWIAPSQKAKVDFRTKIVDELCRLYPVNRFAVEDVRFNHYRKRWGKHFSTVEIGKAEFYKHLRMRGELTLYTGVETATLREKFRLQKNPVKRELTWTTHAVDAIAIGSAEVGCVNPYPPEFWVWKRFEYARRQLHRLEPDKGDVRRRYGGSWSIPPFKKGDVVLWRNRLARVGGFMDGHGISLHSFGLKNKRFTQDANPHECTKLFNQHIFGKQEQPQFLPPINGVGFLGGS

SEQ ID NO: 344 - protein, 314 aa, Moorea sp.; identical to SEQ ID NO: 58

SEQ ID NO: 345 - protein, 343 aa, Thermincola sp.
MFKRVPVVGVDGKPLMPTTPRKARLLIKDGLAKPRRNKLGLFYIQMTRPVGEEIQPLSLAVDPGAKYDGVAVASHRQVEIRAMAFLPDDVPKKMDARRNLRRARRYRNTPRRPARFDNRKRDGYWLAPTQRSKVETRLKVVRELCMVYPVRLIVTEDVRYNHYRFRDGKYFSTVEIGKTLTYREYRKLAVLKLVEVADTDAWREKFGLQKQTDKKWEQVPATHANDAVAMLIGVTGCQNADAPFYVWRRLQYARRSLHRQNPQKGGIRPRFGGTANGGFFRKGDWVEAEKAGKTYRGWVCGLPTDISKVLGIADADGKRIGHFSPRKARLLARSTGFSWKLAV

SEQ ID NO: 346 - protein, 337 aa, Microcystis sp.
MARVPVISKDGKPLMPTKPSRARRWIKEGKAIGKFNDLDIFYVQLTDEPSDNKTQPIAIGIDPGKLFSGIGVQSSLFTLWKTHLELPFNLRAHRQKRFSNRKQGKLAPSIKANRQLELRVVSELTKIYPITDIYFEYIKADVDLTSGRKGAKSGKGFSSVMVGQKWAIEQLSQLATVHTRFGWQTSNLRKHLRLEKSKNKAEQSPESHANDGIALACFQFLDYLPFHTSNGHGYDWKGSVKVTNAPFAVIKRPPISRRQLHLMVFSKGGKRRKYGGSTTRHGFRKGDLVSSPKGIGYVSGDTEKQLSVSDTNGQQLGQIAVSKIQLIRRSNGLIVSR

SEQ ID NO: 347 - protein, 341 aa, unidentified
  REGION 1..341: note = Candidatus Poribacteria bacterium
MFVPVKTRDGQQLMPMHAARARKLIKRGEATPYWNNGIYCIRLNKEPSDREIQKIAVGVDPGSKKEGFTVKSEAHTYLNVQADAHGGVGKKVEKRRELRRGRRSRKCPNRKNRTNRLANRKRIPAGTRARWDWKLRILDWLSKLYPITHVCVEDIKAETKQYQKQWNQSFSPLEVGKQWFYTEVRKRWELFTVEGWQTKEIRDRLGLKKSSKKLSETFEAHCVDSWCLAYHTVGGQSIPDNTAIFCIAPIPIRRRELHRQNPQKGGKRPRYGGTMCLGISKNTLVKHVKHGLLRVTGFDKEGLNLSELGSAKRVVRNAKQGTYRVLRKLNFRYKDGNSPLC

SEQ ID NO: 348 - protein, 382 aa, Anabaena sp.
MRVPVISANSTPLMPTKPSRARRWIKDGKAIGKFDKLGIFYVQLLVQTSNTETQEIVIGLDPGKLFSGIAVQSKKFTLQMLHLVLPFKTVKDRMEQRAMMRRNRRGRRINRKLFFSDRNHRQARFDNRHNSKLPPSIRANKDLEYRVINLLLQLYPIKTIVVEEVEARGSKGFSPVMVGQRYQMSRLSKLVNVVLKKGWETSNLRKHLGLHKEKADKSLQIPETHAVDAVTLGCSEFVKYQIWEGAKNHGASWIGNVDVTESQFTIVRRPPVSRRQLHLMTFNSCGNRRKYGGTTTRHGFRKGDFVRASQGSKTFFGWVSGDTEKQVSVSDANWKRLGQCTVKKVKLIRRSTGLIITAVKTARVVSLSACFVTEFPTYREVL

SEQ ID NO: 349 - protein, 408 aa, unidentified
  REGION 1..408: note = Ga0315294_10040325
MPNRKRQIKQETRVDKVGGHKAHSRPKSTELTGRGSPKDDRNASLVSVRSVSQSRRDSTKKKAVRPISSGGRSNPVQYVPVISKTGKPLMPCCPARARELISKGNAVGKWKVGIFYIQLTQREDGVVQTIAVGIDPGSKREAFTVKSAKHTYLNVLADAVAWVKDAVETRRMMRKNRRFRKTPCRASRYNRTIGGLPPSTKARWQAKIRIVDILAKLYPITDYIVEDISATTKEGKRKWNASFSPLEIGKKWFYTELQKRGSLTTKQGYETKELRDTLGLKKTKSKMEEKFSAHNLDSWVLANSVVGGHAKPDNEAIWRLIPLRFHRRQLHYLQATKGKRLHYGSTMSLGIKRGSLAMHPKWGLCYLSGYMGDRVSLRCLADGVILCQNAKKEDLKILRFNSWRYKAA

SEQ ID NO: 350 - protein, 300 aa, Planktothrix sp.; identical to SEQ ID NO: 122

SEQ ID NO: 351 - protein, 365 aa, Microcystis sp.; identical to SEQ ID NO: 8

SEQ ID NO: 352 - protein, 365 aa, Microcystis sp.
MARVPVISKDGKPLMPTKPSRARRWIKEGKAIGKFNDLDIFYVQLTDEPSDNKTQPIAIGIDPGKLFSGIAIQSSLFTLWKAHLELPFKRVKERMENRCLMRRGRRGRRINRQLPFNLRAHRQKRFSNRRQGKLAPSIRANRQLELRVVSELTKIYPITDIYFEYIKADVDLTSGRKGAKSGKGFSLVMVGQKWAIEQLSQLATVHTRFGWQTSNLRKYLRLEKSKNKAEQSPESHANDGIALACFQFLDYLPFHNYNGHGYDWKGSVKVTNAPFAVIKRPPISRRQLHLMVFSKGGKRRKYGGSTTRHGFRKGDLVSSPKGIGYISGDTEKQLSVSDANGQRLGQIAVSKIQLIRHSNGLIVSH

SEQ ID NO: 353 - protein, 420 aa, unidentified
  REGION 1..420: note = Ga0373630_0000642
MVVATKVLTSLSKELRIGGRCATPVGLEARTDASLVRTSAGEPLNPVPLEEARPHGHWRREIHPAETERELGNPISRVPVVDADGKPLMPCTPAKARTLIKQGRARPRRSKLGIFYIQLNYRQRPNNQILAIGVDPGSKFEAVSVVGGRDTVLNIMLRAVEWVKETVEQRRQMRRARRYRKTRRRTCRGDNRHPKGRVPPSTKARWDAKLRIISQLKKILPISHAVVEDIKAAAKRGYKRWNVNFSPIEAGKQYFYPALKAMDLEVTVKSGNETKVFRDSLGLKKIRNKSKPVFESQCVDSWCLGATATGATKPIKSLYYMVPLRFHRRQLHRLEPSKGGVRRRYGGTVSLGLKRGTLVKHVKYGLCYIGGNLKNMFSLHSLKTGRRITQNAKRSDFKILTRMAFRTQFLPPLKGAGFLG

SEQ ID NO: 354 - protein, 359 aa, Sulfobacillus sp.
MRIAVVSLHGKPLSPTTPAKARKLIKSGGAIPKRDKLGTFYLQLTHPTREEIPHDTVVGIDPGKLYSGVSVQTPQATLWMGHLVLPFPLVQKAMADRRQSRRFRRYRKTPHRPIHFLHRTGHKIPPSIKANRELEWRVLQELAKIYPITHVVYEVVKARGTQSFSPVMVGQQWQMNRLAERWPLEPRQGWETAQLRLALDLKKTRKKAERSPASHAVDGVALAASHFLHYVPFYEKNGDHGQRWEGTCHVTEAPFAVIQRPLFFRRALHFRNPLSHGRRKRKGGTITPWSIRKGDYVEAMKAGLTVRGYVSGYTQTPTTKALSVADARWHRLGQFAVSHVRLLSRSARLLVTPFSSARC

SEQ ID NO: 355 - protein, 360 aa, unidentified
  REGION 1..360: note = Ga0315280_10001324
MSENVPIVSASGTPLMPCKPSKARKLLAKNLAEKCWNRLGQFYLRLKFNPKSPNQGQHVCLAVDTGSRWDGIAVVTAKRVLTTAELVLPKGIAGKRKARIAGKLEMRRRMRRARRYRKTPRRAKRFNNRRRSEGWLAPSQKAKVEFRIKIVDELRRLYPVDRFAVEDVRFDHYRKRWGKHFSTVEIGKTRFYEHLRSIGHLSLYAGAETAEWRKKLGLPKNFRKSALKWDAHASDAIAIGCAETGCTDPSPPEFWVWKRFQYARRQLHRYKLSGGGVRRRYGGSRSVYPFKKADVVVWRGQLARVGGYMDGRISLHAFTLKNKRVTQNARRKDCTRLFNQRIFGKRILSPTTEAVSLRGI

SEQ ID NO: 356 - protein, 365 aa, Microcystis sp.
MERVPVISKDGKPLMPTKPSRARRWIKEGKAIGKFNDLDIFYVQLTDEPSDNKTQPIAIGIDPGKLFSGIGVQSSLFTLWKAHLELPFKRVKERMDNRRLMRRGRRGRRINRQLPFNLRAHRQKRFSNRRQGKLAPSIRANRQLELRVVSELTKIYPITDIYFEYIKADVDLTSGRKGAKSGKGFSPVMVGQKWAIEQLSQLATVHTRFGWQTSNLRKHLRLEKSKNKAEQSPESHANDGIALACFQFLDYLPFHNSNGHGYDWKGSVKVTNAPFAVIKRPPISRRQLHLMVFSKGGKRRKYGGSTTRHGFRKGDLVSSPKGIGYVSGDTEKQLSVSDTNGQRLGQMAVSKIQLIRRSNGLIVSH

SEQ ID NO: 357 - protein, 364 aa, Anabaena sp.; identical to SEQ ID NO: 245

SEQ ID NO: 358 - protein, 433 aa, Microcoleus sp.
MIRVPVLSPKGKPLMPAKASRVRRWLKSGKVKVIRNDLGVFQVQLVKEPSGEQTQDIAAGIDPGKLFTGMAVQSKSVTLFLAHLNLPFKTVTKRMQGRAMMRRGRRGRRINRKVPYDQRNHRECRFDNRKGHKIPPSIRANKQLALRVIQELSKIYPFTHVLVEVIKARGDKGFSPAMVGQYWQIEQLEQAGYTVHTQEGWHTSNLRKYLGLPKSKNKAEESPAAHAVDGICLAASRFIRYRQIKGRSGTFLGSITVTPCQFAVISRSPICRRQLHLMIPGKGGKRRHYGGTLTRHGLRKGDYVKAEKAGITYYGYVSGDTKTQVSVSDAKWKRIGRFTTKKVQLLQRNTGLVSTVGLSNLALSEVEGRGLTSIPLRPTSLRSESHEVKRWISEYQGRERTFFNCCLFPCSTDVLPYSCYAIQLLIFANGLLL

SEQ ID NO: 359 - protein, 344 aa, Microcoleus sp.
MFVPVVGSNNRPLMPTTPARARRWIESGKATPFFKKGVFCVRLNAKPLSHNYQPIAVGIDPGSKREGFTVKSRTHTYLNIQTHAIDWVKDRVEIRRNMRRGRRFRNTPCRQNRTNRSVNKNRIPPSTKARWQWKLRIAKWLTLMFPISTFVVEDIKAKTWKGAKKWNTSFSPLEVGKRWFYSEIEKIAHLEIRQGFDTCKMRQDLGLLKSKQKLSNLFEAHCVDSWVLANWYIGGHIQPDNTKVIEVIPLEFHRRQLHRLQHSTGHVRCRYGGTLSAEFKRGSIVKHPKYGLCYIGGWQESPTKKDPHRKTISLHDLKTSKRLCQNAAPTDCKFLSYNSWRSGN

SEQ ID NO: 360 - protein, 334 aa, unidentified
  REGION 1..334: note = Candidatus Poribacteria bacterium
MYVPVKSKAGKQLMPTTPPVARHLIKSGKATPYWSNGIFCIRLNYETEEYTQDIAVGVDPGSKKEGFTVKSDAHTYLNVQADAHKNVGKKVEKRRELRRGRRSRKCPNRKNRTNRLAHKERIPAGTRARWEWKLRILDWLSKLYPITHVCVEDIKARSIERAKKWNQSFSPLEVGKQWFYTEIKKRWSLLTLPGWETKEIRDSLDLKKSSKKLSETFEAHCVDSWCLAYHSVGGDSLPDNRDIFCISPIPMRRRELHRQNPQRGGKRPRYGGTMCLGIVKNTLVKHVKHGLLRVTGFDTRGGLNLSEISSCKRVVRGAKSDSFRVLTKLNFQYR

SEQ ID NO: 361 - protein, 387 aa, unidentified
  REGION 1..387: note = coral metagenome
MLRVPVISPDGKPLMPTKASRARRWLNQGLAVIYPNDLNVFAVQLVNQPSGEKTQDIAVGIDPGKLFSGIAVQSNKVTLWTGHLILPYKKVRERMDTRRMMRSRSVGFAERTRRSRRINRKIIFSQRSHRQKRFSNRIGKKVPPSIRANRQLENRVARELCLLYPVNAIVYEVVKANGNQGFSPVMVGQYWAISQLEKIAPVTHREGWETALKREALGLIKDKTDKSRQTVNTHAVDGIALAATHFFRRKNYYYRNGKLSIPENCDLTNAVFSVIRRAPTSRRQLHLLQFSKGGKRRKYGGTTTTHGFRKGDYVEAVKAGKTYRGWVSGETARQVSVSDANWKRIGQFTARKVRLLKRSTGLIVNHKLEARLSSPSVAGVGYPAAKN

SEQ ID NO: 362 - protein, 484 aa, Planktothrix sp.
  REGION 331..337: note = misc_feature - Xaa can be any naturally occurring amino acid
MQRVPVISSNNQPLMPTKSSRARRWIKEGKAIGKFNDLGQFYVQLKVEPLDDKTQPITVGIDPGKLYSGIGVQSANFTLWTGHLELPFKKVRERMDNRRMMRHGRRGRRINRNIPFNQRAHRQVRFSNRRQGKLPPSIRANRQLELRVVKELFKMFPITDIYFEYVKADVDLTSGRKGAKSGKGFSAVMVGQKQMVNWLSQLATVHTIYGWQTSNLRKYLKLEKSKDKSEQTVKSHAVDGITLACYYFLEYKAHFSSNTHGHSWQGNVTITSCPFAVIKRPPISRRQLHLMVPSKGNIRRKYGGTTTEFGLRKGDLVNSPKGIGYVSGQTXXXXXXXYLKLEKSKDKSEQTVKSHAVDGITLACYYFLEYKAHFSSNTHGHSWQGNVTITSCPFAVIKRPPISRRQLHLMVPSKGNIRRKYGGTTTEFGLRKGDLVNSPKGIGYVSGQTKKQISVSDANWKRLGQIAFSKITLIRRSNGLIITC

SEQ ID NO: 363 - protein, 388 aa, Methanosarcinales sp.
MSRASGLPQRGRHSPHAPGEGTPPGGELGGKHSPEAVRIISNPRVPVLAPDGEPLMPTKASRARRWIKGGKAKPIRTKLGIFAVKLVEEPSGREKQPIAVGIDPGSKYTGVAVASKKAILCGFNLELPDWIKKRMEKRRERRRNRRYRKRRRRECRFLNRVGHKIAPSILARKQMELRVVKELAKTYPISEIAVEDVAYDHRKKRNGKYFSQVEVGKSWLLSELEKIAAVKRFRGWETARRRKELGLRKSDRKEERAPEAHVSDAIALCSLVLEDTEMTPFHFDVVRKPKYSRRMLHAEQPSKGGVRKLYGGTTTPYIFRKGDYVEATQGERTVRGWVSGYTRNLISVSDFEWRRLGQFAVSKVRLLERNTRLLLKSKEVRRANSSHL

SEQ ID NO: 364 - protein, 337 aa, Microcystis sp.
MARVPVISKDGKPLMPNKPSRARRWIKEGKAIGKFNDLDIFYVQLTDEPSDNKTQPIAIGIDPGKLFSGIGVQSSLFTLWKTHLELPFNLRAHRQKRFSNRKQGKLAPSIKANRQLELRVVSELTKIYPITDIYFEYIKADVDLTSGRKGAKSGKGFSSVMVGQKWTIEQLSKLATVHTRFGWQTSNLRKHLRLEKSKNKAEQSPESHANDGIALACFQFLDYLPFHNSNSHGYDWKGYVKVTNAPFAVIKRPPISRRQLHLMVFSKGGKRRKYGGSTTRHGFRKGDLVSSPKGIGYVSGDTEKQLSVSDTNGQRLGQIAVSKIQLIRRSNGLIVSR

SEQ ID NO: 365 - protein, 344 aa, unidentified
  REGION 1..344: note = Cyanobacteria bacterium sp.
MFVPVVNSENRPLMPTTPSRAKRWIKSGKATPFWKKGVFCVRLNVEPSNTHCQPIAVGIDPGSKREAFTVKSQSHTYLNVQTHAVDWVKDHVEVRRNMRRARRFRNTPCRQNRANRLVNKNCLPPSTKARWQWKLRIAKWLTKMFPVSAFVVEEIKARTKIGSRKWNVSFSPLEVGKRGFYSELACIAHLETKTGNDTYELRQSLGLKKSKQKLSNKFEAHCVDSWVLANWYVGGHLVPDNTTLIEVIPLKFHRRQLHRLQHSVGHVRSRYGGTISAGFKRGSIVKHPKYGVCYVGGWKEAPIKKDPNRMAVSLHCSKTGRRLTQNAVAAEIKFLSYSSWRVGG

SEQ ID NO: 366 - protein, 386 aa, Microcoleus sp.
MNRVPVVSKEGKPLMPTKPSRSRRWVKEGKAVGKWSDLGVYYVQLTTPPSAEEMQPISVGVDPGKSYSGIGVQSAKYTLLQLHLILPFGRVKKRMETRAMLRRSRRGRRINRNVPFKQRNHRQCRFDNRKQCKLPPSIKASRQLELRVVKELAAIFPVAAIGYERVKADIDQTKRKRAKSGKAFSPVMVGQNWAISQMEKIAPVYVRRGWQKDGNGTFQLRTQLGLEKDKTNKSIAKPETHAVDGVTLACGYFVKYVPFVGFNSHGYAHKGSVNVTSSPFKIITRPGAVKRGKEYGFFRRQLHFEVPDKSGDRKRKGGTITPFGVRIGDLVRAEKAGKSYIGYVSGFTDTKKTKNISVCDYTWKRIGQFVPSKVELIRRSNGLCVA

SEQ ID NO: 367 - protein, 344 aa, Microcoleus sp.
MFVPVVSSENRPLMPTTSSRAKRWVKSGKATPFWRKGVFCVRLNAEPTDRNCQPIAVGIDPGSKREGFTVKSKSHTYLNVQTHAVDWVKDRIEVRRNMRRARRFRKTPCRQNRKNRLVNKTRLAPSTKARWQWKLRIVNWLTKMFPITVFVVEDIQARTWKNRRKWNVSFSPLEVGKHWFYSELRKIAYLEIRTGKDTCNLRQDLGLKKSKQKLSKKFEAHCVDSWVLANSYTGGHLSPDNSSLIEIVPLEFHRRQLHRLQHSIGHIRSRYGGTISAGFKRGSIVKHPKYGFCYVGGWQESPKKKDPCRKTISLHSLNTGKRLTQNALPADCKFLSYNSWRTAN

SEQ ID NO: 368 - protein, 364 aa, Anabaena sp.
MRVPVVDNNHQPLMPTTAARARKWIEKGKAIKRWSDCGQFYVQLLVEPSGSNTQDVVIGIDPGKKFSGIGVQSVKFTLYTAHLILPFPAVRDRMDARRLMRRGRRGRRINRKAEFPSRAHRQRRFNNRRQGKLPPSIRTNRQLELRIVSELCKIYPVSEIRYEYVRADVDLTNRRKKAKSGKGFSAVMVGQKWMLSQLGRFAPVVKIEGYQTASTRKHLGLAKNNTDKSKSEFNTHAVDGVAIAATAFVEYRQYHTAKVDGGDWFGSVAITPALFKVILRPPYSRRQLHLMVPVKGGVRRKYGGSTTRHGLPKGDLVSSPKGIGYVSGDTEKQVSVSNANWKRLGQIASSKVQLICRSNGLIVA

SEQ ID NO: 369 - protein, 379 aa, Crocosphaera sp.; identical to SEQ ID NO: 255

SEQ ID NO: 370 - protein, 403 aa, unidentified
  REGION 1..403: note = Cyanobacteria bacterium sp.
MGYTMSSSNIRVPVIDKEGKPLMPTTASRARRWMEQGKAVPQWSDLGVFYVQLVDSASGYKTQPINMGIDPGKRYSGIAVQSQKYTLGMFHLVLMGFIPKQGSAMPGVNSKMDYRRLLRRGRRGRRINRKVAFNLRNHRQKRFENRRQSKLAPSIRSNRQLELRVLSELCKIFPVSVIVYEQVRVDVDLTSGRKGAKSGQGFSVVMVGQEWMLKQLSLFAPVLTREGWQKDGNGTSQIRQYLGLVKDKKNKELPSPETHVVDGIALACAPFVQYKPFHTANTRGCVWMGSVSITPAIFKVISRPRITRRRLHDAVPAQGGVRERYGGSTTPFGIRKGDLVYYKEQLGYCSGYTNKQLSISDANWKRLGQRAISKCRLVARSTGLVVSGALNPTQPPLLSLPAV

SEQ ID NO: 371 - protein, 402 aa, unidentified
  REGION 1..402: note = Deltaproteobacteria bacterium sp.
MQSRSGEGYKNVRMHVLVPTSSGFGRSDGSTEPKPSIATPRDTKLRKEHEYRVPVVSVDGNPLMPTTPAKARKLIKGKQAIGKWSKLGIFYIQMQRPVGDRTQEVAFGLDPGSKFEGVAVVSKEKVLQTGMNILPKGIVKKLEQKRRQRRFRRYRKTWRRPARFDNRTRAEGWIAPSQKAKVDFRLKIIEELKKLYPITKAVVEDVRFNHYKKRWGKHFSTVEIGKKRTYDKLIEWFGEVRLISGVETGEIRKEYRAKKVSEKREKSVYSHAIDAVVIAAKETGLGLLMIPSFFIWRRYQYPRRQLHKSQFKKGGIRRREGGSNSMEGFRKGDVVLYRGELARGGGYREGIGLSLHQFDTDNKRFTQRAKPSDCIRLFNQKIMYEQPIPPTTEVVGFLGGAP

SEQ ID NO: 372 - protein, 336 aa, unidentified
  REGION 1..336: note = Ga0315284_10078857
MLVPVLDKKKNQLMPCTCKRARLLMERKQAKSYWYKGIFCIQLLKDPSDTAKQPIVLGIDPGSKREGYTIATPKRVVFNITTNTPDKVKSNVETRRNLRRTRRSRKTPYRKCRSNRSIKNRVSPSTKARWNAKLRVISSLQKILPITSINVEDIQAVTKKGNPKWNKSFSPLEIGKKYFYDQIISKKLKLVTTKGFDTAARRKLRDFKKSSKKLEYKWESHNVDSHCLCEILLNKELRPENKLYKIEFLEFSRRQIHVQNPKKGGIRKSYGTTNSLGKPRGMLLRSKKTKELVYLGGTSKGKVSVHNLVTGKRLSQNCNLVDYDCLGIRKWKIQLI

SEQ ID NO: 373 - protein, 397 aa, unidentified
  REGION 1..397: note = Ga0315284_10003686
METTTRTELQERQSASLALPSSAESLNAMISDETNKVDAKSKFYSHLRSEYNSEDRASMSGRVFVLSKDGKPLTPCKESKARKLLEGKQAVPVWNKFNQFGLQMLVDTRKEIPKTVLGCDFGTKFEGYSVISGTENILNVMWKLPDKKKLVKKLEERKALRRARRFRNCRRRECRSDNRSKKGFIAPSQLQIIQSRQKCISELFNCYPFDAVVIEDVCFNHRDNRWGKNFSTIEIGKKMLYDFLRVKVGVGNLIQFNGYDTQGFREKLSLKKSSDKSEKKFSSHCVDSFVIANELSSATPNQDLVYVDDNYRFVRRRLHDTQPAKGGIRAKFSSGIFKGIRKGSMCEFGQIVGGTKEQVWYCDFDLQDNGRKIYQKGKMLNKITWLSHHYKSEGISG

SEQ ID NO: 374 - protein, 419 aa, unidentified; identical to SEQ ID NO: 272
  REGION 1..419: note = Ga0315284_10024242

SEQ ID NO: 375 - protein, 364 aa, Anabaena sp.; identical to SEQ ID NO: 245

SEQ ID NO: 376 - protein, 358 aa, Moorea sp.
MLRVPVISPDGKPLMPTKASRARRWLLCGLAVVYPNDLNVFAVQLVNQPSGNQTQDIAIGIDPGKMFSGMAVQSSKITLWTGHLILPYKKVRERMDTRRMMRKTRRSRRIDRKVAYSQRSHRQKRFSNRRVKRVPPSIRANRQLENRVTKELCFLYPVNVIVYEVVKARGSKGFSPVMIGQYWAISQLEQIAPVIQKQGWETALKREALGLIKDKTDKSQQTVNTHAVDGIALAATHFFRRKNYYHRNGKLSVPKNCDVTNAVFSVIRRAPISRRQLHLLQFSKGGKRRKYGGTTTSHGFRKGDYVEAVKAGKQARGWVSGETVRQVSVSDVNWKRIGQFTARKVRLLKRSTGLIVNH

SEQ ID NO: 377 - protein, 349 aa, Desulfitobacterium sp.; identical to SEQ ID NO: 215

SEQ ID NO: 378 - protein, 361 aa, unidentified
  REGION 1..361: note = Cyanobacteria bacterium sp.
MRVPVISSDDQPLMPTKPSRARGWVREGKAKGFFKDLSQYCVQLLEEPTGTDTQSIAVGVDPGKKYSGLGVQSANYTLWKGHLILPFETVKKRMEQPRMMRRGRRGRRINRKLPYKQRAHRQKRFNHRRGHKLPASIRANRQLEYRVVKELTKVYPICAIYYEDVEAKGDKAFTPVMVGEKFMLQWLEQLAPTHTKLGWETASLRRDLKLEKSRNQGESTPASHAVDGIALASHSFRGMEKINGKNYRGQVWQGEVNLTESPFTVLRRPPVSRRQLHLMVEPLGGVRRKYGGTVTRHGFCKGDYVQASRKDQAFFGWVSGDTKSQVSVSNANWKRLGQFSTNKIRLLKHSTNLVTTAKAVI

SEQ ID NO: 379 - protein, 257 aa, unidentified
  REGION 1..257: note = Cyanobacteria bacterium sp.
MYRVPVLSKNGEPLMPTKASRARRWLKEGKAVIYKNDLHSFAVQLTVDSGEETQPVAVGIDPGKHYSGIGVQSSKATLFTAHLELPFQRVKDRMETRAMMRRGRRGRRINRKLPFNLRAHRQKRFNNRRGHKLPPSIRANRQLEYRVVKELSGLFPISSIIYEIVKAKGDKGFSPVMVGQKVMTEQWLPEIAPVTTKYGWETSARREMLGLEKDREKSNQTPATHAVDGVALASYQFLKYKRIQGYKGWFEGSVELE

SEQ ID NO: 380 - protein, 361 aa, unidentified
  REGION 1..361: note = Cyanobacteria bacterium sp.
MQLRVPVQNPDGSPAMPTKPSRARRWVRDGKAVGKWSDVGIYYVQLVDEPSGREIQPIALGIDPGKRYSGVAVQSAKATLFLAHLILPFADVTKKMTGRRILRRARRGRRINRKVPFTLRAHRQKRFDNRRQKKLVPSIRANRQFEVRVARELCAIFPVSSIVYEYIEAKGDKAFSPVMVGQKVMLEWLSELAPVVTQLGWQTAVLRNHLGLVKDKADKSKQSPETHAVDGLALAASQFVQYRQYHKVGEDGANWIGSVDITPAPFKVIARPNLFRRQLHFENPTTAGGRKRKGGTVTPFGFRSGDFVESVKAGKVDRGWIGGFSEVNQVVSLYDVNWKRIGQFSVSKTKLVQRSTKLCVA

SEQ ID NO: 381 - protein, 300 aa, unidentified
  REGION 1..300: note = uncultured cyanobacterium
MNTKTNQVTRVPVVDPVGKPLMPTTPARARKWMEIGRAIPKRNKLGVFYVQLTVKPSGYSTQPIVAGVDRGKCFTGIAFQTKLVTIALFHACLPGFYKSKNLGKKNETLDRQSVTGKMAKRAELRRTRRGQRIDRKKLFKLRNHREKRFDNRRKKKLPPSVLSNRQMELRILNEMALILPIAEIRDEACGGNTKKNGKGISPVTVGQEWFRSQASRIAPVVEVDSLETGKYRNHLRLVKDKKDKSKRTPETHANDAIALAASYFIQYKPFHTANTHGHEWIGKCIVTPALFRRVNSPQVV

SEQ ID NO: 382 - protein, 297 aa, Moorea sp.
MLRVPVISPDGKPLMPTKASRARRWLNQGLAVVYPNDLNVFAVQLVNQPSGEQVQDIAVGIDPGKLFSGIAVQSNNATLWTGHLVLPYKKVRERMDTRRMMRSRSVGFAERTRRSRRINRKVPYSQRSHRQKRFSNRIGKKVPPSIRANRQLEKRVAKELSLLYPVKAIVYEVVKARGNKGFSPVMVGQYWSISQLEKIAPVTQKQGWETALKREALGLVKDKTDKSRQSLNTHAVDGIALAATHFFRRKNYYHNKGKLSVPENCNITNALLFVIRRAPISRRQLHLLQFSCMWKTT

SEQ ID NO: 383 - protein, 362 aa, unidentified
  REGION 1..362: note = wastewater metagenome
MKSTRVKKFIDSGKGRIRYDRKLKIHYLQLLVDPSGEDTQEVHLGLDPGSTFDGISVVSSKCHHVNIELIQRPKKGKNAIKTFKARQASNRRVRRSRLRHRRIRFDHRTSKKLTPTIKANVDFRKWVISKLLRIYPISKIIVEDVKFNHYKSTNGRAFSLVEQGKSELYNFIRSLGIQLETYDGFNTKKLRVNSFGIDLKSKSKDDQSFEAHCIDSFVLACNKSNVFDINTGEIFEDQPVITNELDINRKVTFIEKIVKVRRCLTRTRALYKSSQRPEGANYYIKLKGGIKQIVTKLGKRNVCRIKPEGIHSNHPRQWIYIDNGKSERYKCNTAPYGGTRLHGKSFFRNGEWENRSVWNIVH

SEQ ID NO: 384 - protein, 360 aa, Moorea sp.; identical to SEQ ID NO: 42

SEQ ID NO: 385 - protein, 358 aa, Moorea sp.
MLRVPVISPDGKPLMPTKASRARRWLKQGLAVVYPNDLNVFAVQLVNQPSGYQTQDIAAGIDPGKLFSGIAVQSSHATLWTGHLVLPYKKVRERMDTRRTMRRTRRGRRINRKVPYYNRSHRQKRFSNRESKKVPPSIRANRQLEQRVVKELSFLYPLKTIVYEVVKARGNKGFSPVMVGQYWAISQLEKIAPVTQKQGWETALKREAIGLVKDKTDKSRQTVNTHAIDGIALAATHFFRRKNYYHSKGKLSIPENCNITNALFSFIRRAPISRRQLHLLQFSKGGKRRKYGGTTTSHSFRKGDYVEAVKAGTTYRGWVSGETAKQVSVSDINWKRIGQFTARKVRLLKRSTGLLVNY

SEQ ID NO: 386 - protein, 626 aa, unidentified
  REGION 1..626: note = Ga0315279_10000169
METRVVKIITCNSERDLKDLVRDGDGRLKTTEPIARGRVRDIEGASLALSPSIGQSRREQLPELSAKVIQRKVPVMVPVLSVEGKPLMPCHPARARELIKKKGAKERWYRGIYAIQLIHKNGSFLQNSVCGIDSGFYREAFTIQSVDHTYLNVLSDAVCWVSTRVENRRNSRKSRRGRNLPCRKSRSNRMNKKSWLAPSIKSRWDIKLRIIDFLKKLYPITTYVIEDINAKNKKNCRRWNRVFSPLQTGKNWFYYRVEKTGELILKKGYETYIRRDLFGFKKLKDKFSESFYSHNIDSWVLASFVTGKRDLDMTKVFRMVPLKFHRRVLHNLSPAKGGYRKKFGGTMSLGFKRGSVIYHKELGYAYIGGTADGRVTIHNIVTGNILTSRAFPADCKFIYFNNWRTVFIDECGNFIGKRHRDIFLKIEYCTPEIIEKKRQTNLKRYGVEKYTNREQAKKTSLERYGVEYTCAVPEIIEKRVATLMERYGRVFNVDEPHNKFHLENKEKFIQDYESGLILGDLAIKYKISEPTLSRIIKDLGLSRTVVKAKSYVIDTPSEATSDYLKACLENNKILSFYEYGKIKGQQYCTKMKRWFNKGRLYNNLLEELKSVALCAEEHETFLNKLR

SEQ ID NO: 387 - protein, 380 aa, Richelia sp.
MNQTTRVPVISPDGKPLMPTTPARARKWIKSGKAIGKRNKVGVFYVQLLSVPSGYETQKIVVGTDRGKAFTGIAFQSKLATIVLFHACLPGFYKSKKTSKDRQSVTGKMEKRTELRRTRRGQRINRQVAFKLRNHREKRFNNRRQNKLPPSVKANREMELRILGEMSKILPITEIRDESCGGNSKKNGFGISPVTVGQEWFRLQASKIAFVVEVDSLDTGKHRDYLGLVKNKKDKSVQSPETHANDAIALASTYFVQYKEFHTTKTHGHRWIGECVVTPAPFVVVTRPKLFRRKLHQENYSKGGILKRQGGTVTPFGFRSGDYVQTSKKGEIIRGWIGGFTNSGKTKNVSIYDHNWSRIGQFNPNNVKLIKRSTRLCVVA

SEQ ID NO: 388 - protein, 365 aa, Microcystis sp.
MARVPVISKDGKPLMPTKPSRARRWIKEGKAIGKFNDLDIFYVQLTDEPSDSKTQPIAIGIDPGKLFSGIGVQSSLFTLWKAHLELPFKRVKERMDNRRLMRRGRRKRRINRQLSFNLRAHRQKRFSNRRTGKLAPSIRANRQLELRVVSELTKIYPITDIYFEYIKADIDLTSGRKGAKSGKGFSSVMVGQKWAIEQLSQLATVHTRFGWQTSNLRKHLGLEKSKNKAEQSPESHANDGIALACFQFLDYWPFHASNSHGYDWKGSVKVTNASFAVIKRPPISRRQLHLMVFSKGGKRRKYGGSTTRHGFRKGDLVSSPKGIGYVSGDTEKQLSVSDANWKRLGQITVSKIQLIRRSNGLIVSH

SEQ ID NO: 389 - protein, 390 aa, unidentified
  REGION 1..390: note = wastewater metagenome
LIWAWQPERRRRCPPSHRPLGSGVWKVCIEEGVSHMLVPVMDLDGTTPLMPTKKHRAMRLVERGDATPFWRKGVWCIRLNREPSARNLQAIVVGVDPGSKREGYSVVSEAHTIANVQADAVTHVKDAVEARRNARRTRRTRNKPHRVCRSNRSALRRQESDWLPPSTRARWEWKLRNIRFLARLYPVTDVVVEDIKARTRKGRGGQWNRSFSPLEVGKQWFYVQVEKDYRLFLKQGWETAEIRKTLGLSKSSDKMAERWDAHCVDAWAIANDALGQPHTAPDDTSMLITKSLKFSRRQLHRFQPSKGGERRPYGSTRSLGFKRGSIVRHPKWGVCLVGGTSKGRLSLHSQESNKRLCQNARAGDITFLAYNDRSQRYVPSMNVGVSTLGI

SEQ ID NO: 390 - protein, 378 aa, unidentified
  REGION 1..378: note = Cyanobacteria bacterium UBA11371
LVALVKGTSCFWIISMNSNTRIPVLAPDNQPLMPTLYRRAQKWVETGKAEWVSNDLNIKQVRLLKKPASRNTQPIVIGVDPGKKFSGIAVQSSLFTLFTAHLILPFPNITKKMTGRRILRRARRGRRINRKVAFHLRAHRQKRFDNRRQKKLVPSIRANREFELRIVKELMRLFPVSTIVYEYIEARGDKAFSPVMVGQKIMLEWLRQLAPVVTQFGWQTANLRTHLKLKKQKADKSAQTPQTHAVDGIALAASQFVRYQAFHRLGEDGYHWVGSVRLSSSPFRVIARPNLFRRQLHFENFSKGGIRKRKGGTVTPWSFRSGDFVQAEKAGRVYRGWIGGLSEVNKVVSVYDHNWHRIGQFSVGKVTLIKRSTKLCVA

SEQ ID NO: 391 - protein, 286 aa, Prochlorothrix sp.
MRPAVGVDPGSKREGFTVKSQAHTYLNQQFQAVNWVKDAEEASTKARRARRYRKTPYRVNRKNRKRGGIPPSTKARWQLKVRVVKVYAAIFPISHIGIEDVKAETRKGCKTWNTSFSPLEVGKQWCYSELREIANLTTFNGYEDTYLTRQALRLKKSKNKLSKGFNAHCVDSWVLAYLLVGGDSFPDNTEVIECKPIRLHRRQLHVFNPGERGYRRPYGGSMSQGLKRGGIVKHPKYGKCYVGGEDIVKSRVSLHSLAAGKRLCQNAKPEDCRFLAYNSWRTVKPS

SEQ ID NO: 392 - protein, 346 aa, Leptolyngbya sp.; identical to SEQ ID NO: 238

SEQ ID NO: 393 - protein, 408 aa, unidentified; identical to SEQ ID NO: 349
  REGION 1..408: note = Ga0373628_0001310

SEQ ID NO: 394 - protein, 358 aa, Moorea sp.
MLRVPVISPDGKPLMPTKASRARRWLNQGLAVIYQNDLNVFAVQLVNQPSGEQTQDIAIGIDPGKMFSGIAVQSNNATLWTGHLVLPYNKVRVRMDTRQMMRKTRRSRRINRKVPYSQRSHKQKRFSNRVSKKVPPSIRANRQLEQRVAKELSLLYPVKVIVYEIVKARGNKGFSPVMVGQYWSISQLEKIAPVTQKKGWETALKREALGLVKDKTDKSRQSVNTHAVDGIALAATQFFRRNNYYHSKGKLSVPENCNITNTLLFVIRRAPISRRQLHLLQFSKGGKRRKYGGTTTSHGFRKGDYVEAVKAGKVTRGWVSGGTAKQVSVSDIDWKRIGQFTARKVRLLKRSTGLIVNH

SEQ ID NO: 395 - protein, 339 aa, unidentified
  REGION 1..339: note = Candidatus Poribacteria bacterium
MFVPVVDKNQKPLMPTKPSRARRWIKQGKATPFFNKGVFCVRLNIEPSDSQLDDVVVGIDPGSKKEAFTVKSEHHTYLNVQADAVTHVSKRIKSRTEQRRGRRFRKRPYRQNRINRTQGGIPPSTRARWGLKLRILNWLSKIYPISHVVVEDIKAWTRKGSKRWNRSFSPLEVGKQWFYDEIERRWTLFTKAGYETKQLRETLGLKKSSNKMSDSFETHCVDSWVLANCIVEGHDVPDNTDIVHIVSYQLHRRQLHRLQPSKGGKRSRYGGTISMGIKRGRWVQHTKHGICFVGGFQKQRLSLHSLATGKRITLSAKLEDLTMLCFSGWRTRSAVSSPH

SEQ ID NO: 396 - protein, 382 aa, Geitlerinema sp.
MRVPVVSKEGVPLMPTKPSRARRWLKEGKAVQKWSDVGVFYVQLTVEPSDTQTQEVAVGVDPGKHFSGVAVQSAKATLFMAHLILPFETVKKRMEQRRTMRRTRRSRRINRNVPFKFRNHRSSRFSNRKGHKLPPSIRANRQLELRVVRELAVIFPISTIVWEYVRADVDLTSGRRTARSGRGFSPVMVGQRWAIQQMEEIAPVVQLQGWKTANLRRELGLSKSGNKGEATPESHAVDGIALASSQFVRYESFHGTNVRGHRWKGSVCITPAPFRVIRRPPICRRQLHLLQPAQGGKRRKYGGTVTRNGFRKGDFVRASRAGRQYWGWVSGDTARQVSVSDINWKRLGQFSASKVQLLAPNTNLLVSGASNPTRPALCSSRA

SEQ ID NO: 397 - protein, 364 aa, Mastigocladus sp.; identical to SEQ ID NO: 276

SEQ ID NO: 398 - protein, 329 aa, Moorea sp.; identical to SEQ ID NO: 57

SEQ ID NO: 399 - protein, 365 aa, Microcystis sp.; identical to SEQ ID NO: 303

SEQ ID NO: 400 - protein, 360 aa, Moorea sp.; identical to SEQ ID NO: 42

SEQ ID NO: 401 - protein, 408 aa, unidentified
  REGION 1..408: note = Ga0373627_0019696
MLNQKLRVKRETSVVKVSKEAVRRQLNVLPVAGKSMSRMLLKSSTSADVSREEGNCSSLRGKRNGNILYVPVVSSTGKPLMPCHPARANELIKKGKALRRFRKGLFYIKLTEREDGDVQPIACGIDSGSKKESFTVKSEAHTYLNLQADAVTWVKSAVETRRNMRRARRQRKTPCRKPRWNRASLKKEGRIPPSTKARWQLKLRIASWLSKLFPISHFVVEDIKAVTKKNARKWNRSFSPLEVGKKWFYKEIEKIAKVTLKEGWETSNMRLNSGLKKLKDKLSNDFHAHCVDSWVLANDYVGGHITPDYTGVICLTPLRFFRRQLQVLQPAKKGYRKPFGSTRSMGFKRGSLVKHPKYGVCTVGGTSKNRISLNNLKTDDRLCQNAKPSDCQLLTMLSWRLGSNSSQG

SEQ ID NO: 402 - protein, 334 aa, unidentified
  REGION 1..334: note = Candidatus Poribacteria bacterium
MYVPVKSKEGKQLMPTTPPVARHLIKSGKATPYWSNGIFCIRLNYETEEYTQDIAVGVDPGSKKEGFTVKSDAHTYLNVQADAHKDVGKKVEKRRELRRGRRSRKCPNRKNRTNRLAQKKRIPAGTRARWEWKLRILDWLSKLYPITHVCVEDIKARTIERAKKWNQSFSPLEVGKQWFYTEVKKRWSLLTLQGWETKEIRDSLGLKKSKQKLSATFDAHCVDSWCLAYHSVGGASLPDNRDIFCISPIPIRRRELHRQNPQRGGKRPRYGGTMCLGIVKNTLVKHVKHGLLRVTGFDTRGGINLSEISSCKRVVRGAKSDSFRVLTKLNFQYR

SEQ ID NO: 403 - protein, 381 aa, Scytonema sp.; identical to SEQ ID NO: 3

SEQ ID NO: 404 - protein, 419 aa, unidentified; identical to SEQ ID NO: 272
  REGION 1..419: note = Ga0315294_10131761

SEQ ID NO: 405 - protein, 335 aa, unidentified
  REGION 1..335: note = Candidatus Poribacteria bacterium
MFVPVVDKKRNPLMPTTPARARKWVKSGKATPFFRNGVFCVRLNVEPSGTQTQAIAVGIDPGSKKEGFTVKSEKSTYLNVQADAHNKVSKKVEARRQLRRGRRSRKCPNRKHRTNRMANQQRLPAGTRTRWDWKLRILNYLSTMFPITHVCVEDIKTQTRQGARNWNASFSPLEVGKQWFYAEIQKRWILVTLRGFETKAIRDSLGLKKSGNKMSNDFNAHCVDSWCLAYHVIGSDTDQVDNTCVFYVSPIPIARRQLHRQNPQKGGRRPRYGGTMCNGIAKNTLVKHVKHGLTRVSGYMEKKGYSLYSLGGKRLTQAAKRESFKVLTRLNFNYI

SEQ ID NO: 406 - protein, 397 aa, unidentified
  REGION 1..397: note = Ga0315273_10003313
MQELKQLQDTPQVLDNWEESFNSMSDNAKQRSKHLHYGGCGCNRKGRLSTHSVFVIHKDGTPITPTKPQRAKKLLESGVAKSVWNKFGQFGIQMLVDTRKETPSTALGIDNGTKFEGYSVVCGTENQLNVMWKLPDKKKIVKKLEERKNLRRARRHRNCRRRPARFDNREKDGFIAPSQMVMVNSRLKAIKEFFRCYPISLSGIEDVRFNHAKFRHGKNFSTVEIGKTKIYGFLESRAKLYKFAGYQSQKLRKMYGYTKTRVNKASEKFSSHCSDSLTMAIALTTNQHIHRGKFIVADDSYRPVRRRLHDTQFSKGHIRYPYSQGNFKSIRKGSVCNFGLVVGGSKAYAKIDNWLHKRTTKSVKKIGWLSKRFFIIEERAKFPNHTSMVVPFGSLGS

SEQ ID NO: 407 - protein, 340 aa, unidentified
  REGION 1..340: note = Candidatus Poribacteria bacterium
MFVPVKSKDGEQLMPTHPNKAGMLIKKGLATPYWSNGIFCVRLNFQSKDRYKQEITVGVDPGSKKEGFTVKSESHTYLNVQADAHNGVGKKVAKRRELRRGRRSRKCPNRKNRTNRLANKERIPAGTRARWDWKLRILDWLSKLYPITHVCVEDIKARTIEHAKKWNQSFSPLEVGKQWFYTEIQKRWQLRTLQGWETQEIRDRLGLKKSSAKLSETFETHCVDSWCLAYHAVGGDPIVDNTAIFCISPIPIRRRELHRQNPQKGGKRPRYGGTVWNGLVKNTLVKHVKHGLTRISGFSKQGISLYSLEGKRLCQNAKIQDFKVLRRLNFNYRSGVSSPV

SEQ ID NO: 408 - protein, 365 aa, Microcystis sp.
MARVPVISKDGKPLMPTKPSRARRWIKEGKAIGKFNDLGIFYVQLIDEPSDSKTQTIAIGIDPGKLFSGIGVQSSLFTLWKAHLELPFKRVKERMDNRCLMRRGRRGRRINRQLPFNLRAHRQKRFSNRRQGKLAPSIRANRQLELRVVSELTKIYPITDIYFEYIKADIDLTSGRKGAKSGKGFSPVMVGQKWAIEQLSQLATVHTRVGWQTSNLRKHLRLEKSKNKAEQSPESHANDGIALACFQFLDYLPFHTSNGHGYDWKGYVKVTNAPFAVIKRPPVSRRQLHLMVFSKGGKRRKYGGSTTRHGFRKGDLVSSPKGIGYVSGDTEKQLSVSDTNGQRLGQIAVSKIQLIRRSNGLIVSR

SEQ ID NO: 409 - protein, 365 aa, Microcystis sp.; identical to SEQ ID NO: 226

SEQ ID NO: 410 - protein, 347 aa, unidentified
  REGION 1..347: note = Cyanobacteria bacterium sp.
MFVPVVNSENRPLMPTTPSRAKRWIKSGKATPFWKKGVFCVRLNVEPSNTNYQPIAVGIDPGSKREAFTVKSQAHTYLNVQTHAVNWVKDHVEVRRNMRRARRFRNTPCRQNRANRLVNKNRIPPSTLSRWQWKLRIAKWLIKMFPVSVFVVEDIKARTWKNGRKWNVAFSPLEVGKCWFYSELKSIAHLETRTGNDTYEMRQALGLKKSKQKLSNKFEAHCVDSWVLAFLYVGGHLIPDNTALIEVIPLEFHRRQLHRLQHSAGHVRPRYGGTLSAGFKRGSIVKHSKYGFCYVGGWQESPTKKDPNRKTVSLHNLQTGRRITQNAIVSDIKFLAFNSWRVGGFNR

SEQ ID NO: 411 - protein, 289 aa, Moorea sp.
MLRVPVISPDGKPLMPTKASRARRWLNQGLAVVYPNDLNVFAVQLVNQPSGEQVQDIAVGIDPGKMFSGIAVQSNKATLWTGHLVLPYKKVRKRMDTRRMMRKTRRSRRIDRRVPYSQRSHRQKRFSNRVNKKVPPSIRANRQLEQRVAKELSLLYPVKAIVYEVVKARGDKGFSPVMVGQYWSISQLEKIAPVTQKQGWETALKREALGLVKDKTDKSRQSLNTHAVDGIALAATHFFRRKNYYHNKGKLSVPENCNITNALLFVIRRAPISRRQLHLLQFSCMWKTT

SEQ ID NO: 412 - protein, 365 aa, Microcystis sp.; identical to SEQ ID NO: 408

SEQ ID NO: 413 - protein, 365 aa, Planktothrix sp.; identical to SEQ ID NO: 112

SEQ ID NO: 414 - protein, 364 aa, Nostoc sp.
MRVPVVDKNHQPLMPTTPARARKWVESGKAVKRTSDCGQFYVQLTGEPSGRATQDIVIGIDPGKKFSGIGVQSAKFTLYTAHLILPFQTVRDRMDARRLMRRGRRGRRIDRKVNFLKRAHRQKRFDNRRQGKLPPSIRANRQLELRIVSELCKIYPISEIRYEYVRADVDLTSGRKKARSGKGFSAVMVGQKWMLKQLEQFAPVAKVEGYQTASTRKYLGLTKNSSDKSKSEFNTHAVDGVAIAATAFVEYRQYHTVKVNGGDWFGNVVITFALFKLIRRPPYSRRQLHLMVPAKSGVRRKYGGSTTRHGLRKGDLVTSPKGIGYVSGDTEKQVSVSDANWKRLGQIASSKVQLISRSNGLIGA

SEQ ID NO: 415 - protein, 382 aa, Anabaena sp.; identical to SEQ ID NO: 348

SEQ ID NO: 416 - protein, 338 aa, unidentified
  REGION 1..338: note = Oscillatoriales cyanobacterium
MQYVPVVDSSQRPLMPTTPVAQRWIESGKATPFFRKGIFCIRLNVEPSNRLMQPVAVGIDPGSKREGYTVKSKAHTYLNQQFHAVDWVKDALEASTNARRARRNRKTPYRKNRQNRKRGGIPPSTKARWQFKVRVVKVLASIFPVSHIGIEDIKATTKKGCKAWNTSFSPLEVGKQWCYWELEKIAPVTKFDGWENTYQTRQALGLKKSKKKLSNSFDAHCVDSWVLAYLLVGGDSGPDNTAVMECQPLRIHRRQLHVFNPGKNGYRRPYGGSMSQGLKRGGIVNHPKYGKCYVGGEDIQKSRVSLHSLDTGKRLTQGAKPEDCKFLAYNSWRTVKPS

SEQ ID NO: 417 - protein, 341 aa, unidentified
  REGION 1..341: note = Candidatus Poribacteria bacterium
MFVPVKSKVGQQLMPTSPPVARHLIKSGKATPYWNNGIFCIRLNSKTTEYIQEIAVGVDPGSKKEGFTVKSEAHTYLNVQADAHNKVDEKIEKRRELRRGRRSRKCPNRKNRTNRLANKERIPAGTRARWDWKLRILDWLSKLYPITHVCVEDIKARTIEHAKKWNTSFSPLEVGKQWFYTEVQKRWELLTLQGWETKEIRDRLGLKKSSKKLAETFEAHCVDSWCLAYHTVGGQSIPDHTDIFCIAPIPIQRRTLHREQPKKGGIRSRYGGTILANGLVKHTLVRHVKHGFTRLAGINAKGLFSIYSLDGKRLTTGAKRNSFKVLTRLNFNYWSGHSSPT

SEQ ID NO: 418 - protein, 380 aa, Calothrix sp.
MNQTTRVPVISPEGKPLMPTTCGRARKWIKAKKAVGKRNNLGVFYVQLLREPSGYEIQEIVVGTDRGKAFTGIAFQTKLATIALFHACLPGFYKSKKASKDRQSVTGKMAKRTELRRTRRGQRINRKVSFNQRNHREKRFNNRRQNKIPPSVKANREMELRILTEMAKILPISQIRDESCGGNSKNNGFGISPVTVGQEWFRSQASKIASVVEVDSLDTGKYRDYLGLVKNYIDKSVQSPETHTNDAIALASTHFIQYKEFHTSKTRGYAWVGKCVATLAPFVVVTRPKLFRRKLYQENYSKGGVLKRQGGTITPFGFRSGDYVKVTRKGEIIRGWVGGFTNSGKTQNIAIYDHNWLRIGQFNPKIVKLINRSSRLCVVA

SEQ ID NO: 419 - protein, 409 aa, Geitlerinema sp.
MQRISVLAPDNTPLMPTKRTRAEKWAEQGKAEWVKTNLRIKAVRLLAEPAGRNTQSIVVGVDPGKLYSGIAFQSAKATWFQVHLELPSPKVRERMDNRRVLRRWSRSRRINRKVPFNKLNHREKRFDNRRQKKVPPSIKASRELEFRVVKELSKLFPIVAIGYEKVRADVDLTSQRKGARSPKGFSPVMVGQAYAMERRGQIAPVYTRHGYAKDGNGTSQLRNALGLIKSKEKSEQTPPTHAVDGIALACGYLVQYRPFQQGRNHGPTWKGQVNITSAPFVVIKRPPISRRQRHLIVPGKNGLRRKYGGTVTWHGFRKGDLVVAEMAAGRVSVGYVSSDTARHGSVSDFNWKRIGQFTASKVQLLDRATAAFWSLAPRDCSSAGHRTPPPNVPIPPSPAARGRGGIGGF

SEQ ID NO: 420 - protein, 338 aa, unidentified
  REGION 1..338: note = Oscillatoriales cyanobacterium
MQFVPVVDSNQRLLMPTIPARAERWIKSGKATPFFRKGIFCVRLNVEPSNRYTQPVAVGIDPGSKREGYTVKSKSHTFLNQQFHAVDWVKDAEESSTNARRARRNRKTPYRLNRQNRKRGGIPPSTLARWQFKIRVVKVFATIFPISSIGIEDVKAIAKKGCTKWNTSFSPLEVGKKWCYSELERIAPVTRFDGYNTYLTRQELGLKKSKAKLSNSFNAHCVDSWVMAYLMVGGDSGPENTAVMECKPIRIYRRQLHVFNPGKDGYRRPYGGSMSQGLKRGGIVKHPKYGKCYVGGEDAKKSRISLHSLGTGKRLCQNAKKQDCKFLAYNSWRTVKPS

SEQ ID NO: 421 - protein, 263 aa, unidentified
  REGION 1..263: note = Candidatus Poribacteria bacterium
MFVPVKTKDGQQLMPLHAARARKLVKRGEATPYFNNGIYCIRLNKEPSDRDTQEIAVGVDPGSKKEGFSVKSAAHTYLNVQADAHNQVSKKVAKRRELRRSRRSRKCPNRKQRTNRLANKVRIPAGTRARWDWKLRILDWFSKLFPVTHVCVEDIKARTIKHAKKWNTSFSPLEVGKQWFYSEIEKRWELLLLQGFETKEIRDKLGFKKSLKKLSEDFDAHCVDSWCLAHYTVGGDSSVDNKAVMCISPIPIARRNLHREQYK

SEQ ID NO: 422 - protein, 384 aa, Scytonema sp.
MFVPVVDPNNHPMMPTTPSRAKRWIKSGKATPFFKKGVFCVRLNQEPSNRNTQPVAVGVDPGSKREGYTVKSQAHTYLNIQTHAIDWVKDHVEVRRNMRRARRFRNTPCRKNRKNRLVNKQKLPPSTKARWQWKLRICKWLALMFPISTFVVEDIKAKTWKGSRKWNTMFSPLEVGKKWFYSELKRIASLETRTGNDTYEMRQSLGLKKSKNKLSNKFDAHCVDSWVLANWFVNGHLKPENTRLIEIIPLEFHRRQLHRLQHSVGHIRTRYGGTVSAGFKRGSVIKHPKFGFCYVGGWQESPTKKDPDRKTISLHSLETGKRLTQSAIPIDCRFKSYGSWRTTAVNKRTQESGARSQNELLCDWRMSRGFKSPPSTRCPQLVGV

SEQ ID NO: 423 - protein, 336 aa, unidentified
  REGION 1..336: note = wastewater metagenome
MLYVPVVSSTGKPLMPCHPARARELVRSGRAVRRFDRGLFYIRLTGRADGDVQAVTVGIDPGSKQEGFTVKSEAHTYLNIQADAVDWVSDHVKTRSGMRRARRYRNTPCRKNRTNRSIGGLSPSTKARWQWKLRICRWLVRVYPIESFVVEDICARTKGKRRWDKSFSPLQIGKRWMYSELGKLGRVILKKGWETKEMRDALGLKKTSNKMAEVFEAHCVDSWVLANGWVGGHVKPDNTRILRITPLRFHRRQLHRLQPGRGGIRGPYGGTRSHGFKRGSLVKHPKYGVTYVGGCLKDRISLHRITDGARLCQKARPSDCEFLAFNSWRMRLLPCL

SEQ ID NO: 424 - protein, 365 aa, Prochlorothrix sp.
IMRIPVVDKDHKPLMPTTPARARKWIASGKALKRWSDCGQFYVQLTVEPSGRDTQSIVVGVDPGKLYSGIGVQSAKFTLYTAHLVLPFQKVRDRMDNRRMMRQARRGRRINRKVSFSKRAHRQARFSNRRSGKLAPSIKANRQLEIRVVSELCRIYPITQIRFEYVKADVDLTSGRKRACSGKGFSAVMVGQKWAIQQLEQLAPVVTIFGYQTSITRKYLGLEKNKVDKSKAEYETHAVDGVALAASYFVEYRKYHRQDTDGGDWFGGVGITKAPFFVVRRPPCSRRQLHLMVPAKGSVRRKYGGSTTRHGVRKGDLVKSPKGLGYVSGDTEKQVSVSAASWKRLGQISVSRVQLLRRSNGLVVA

SEQ ID NO: 425 - protein, 412 aa, unidentified
  REGION 1..412: note = Ga0315284_10000005
VVKISTVSVLKETHTKLVRAGNGRLKTTEPTVHGRTEDIGDASQVPFPSVGQSRREKLPSANSEKNKQMRSGPVMVPVLSSLNKPLMPCHSARARELIKQGRAVRRWYKGIFAIKMLDRAVGDIQQIVCGIDPGSKREAFTIMSKNHTYLNILSDAVTHVQERIKNKREMRRARRFRKTPCRISRWNYHRNKIWFPPSIKSRWLIKLNIVKFINKLYPISDICIEDIKAKNFKSKRNWNNNFSPLETGKKWFYEECKKLGVVHLKQGWETFKLRNVFGLKKSKNKMKEIFESHNVDSWVMARSIVNGQLLYPCNKKIFRISSIQWHRRQLHYTNPGKNGKRSLFGGTFSLGLKRGSLVIHPKYGIAYLGGSSFPNRITLHNLKNGIRLTQRGSIKDLKFLCLNNWKTHWIKE

SEQ ID NO: 426 - protein, 358 aa, Mastigocoleus sp.
MLRVPVIDKNGRALMPTKPSRARRWLKEGRAKVYKNDLQVFAIQLTFEPSDRKEQRIAVGIDPGKHFTGIAVQSAKFTLWLGHLYLPFQKVKVLMEQRGMMRRTRRSRRINRNLPVRQRAHRQKRFDNRRQNKIPPSIRANRDLEKRVLDELERLFPLLFNVVIERVKAYGNKGFSPVMVAQEWQLDRLSFDYGIETIEGWQTAQIRRELGLIKQKDSKSDAVVATHAVDGIALAASQFMSYQVTSVNSRGWVGSVDVTACPLTVIRRPPVSRRQLHLLQFSKGGSRRKYGGTVTRHGFRKGDYVEANQGKKIVRGWVSGDTKTQISVSNADWKRLGQFSRNKIQLLKRSNGLIVQCG

SEQ ID NO: 427 - protein, 344 aa, unidentified
  REGION 1..344: note = Oscillatoriales cyanobacterium
MFVPVVNSENRPLMPTTNARAKRWIGSGKATPFWKKGVFCVRLNAEPSNHNYQPIAVGIDPGSKREGFTVKSKSHTYLNIQTHAIDWVKDHVEVRRNMRRARRFRNTPCRQNRANRLVNKNRLPPSTKARWQWKLRIVNWLTLMFPISTIVVEDIKARTRKNGRKWNVSFSPLEVGKHWFYSEVRKIAHLEIRSGNDTYELRQNLGLLKSKQKLSNKFEAHCVDSWVLANWYAGGHIQPDKTKLIEVIPLEFHRRQLHRLQHSTGHIRLRYGGTISIGFKRGSIVKHPKYGFCYVGGWQESPTKKDPYRKTISLHDLKTGKRLTQNASPADCKFLSYNSWRIAN

SEQ ID NO: 428 - protein, 355 aa, unidentified
  REGION 1..355: note = wastewater metagenome
MLVPVMDLDGKTPLMPTRKHRAMRLIERGDATPFWRKGVWCIRLNREPSARNLQAIVVGVDPGSKREGYSVVSEAHTIANVQADAITHVKDAVEARRNARRSRRTRNKPHRACRSNRGALRRQENGWLPPSTRARWEWKLRNIRFLARLYPVTDVVVEDIKARTRKGRGGQWNGSFSPLEVGKQWFYVQVQKDYRLYLKQGWETAEIRKTLGLSKSSDKMLERWDAHCVDAWAIANDALGQPHAAPGDTSMLVTKSLKFSRRQLHRFQPSKGGERRPYGSTRSLGFKRGSIVRHPKWGVCLVGGTSQGRISLHSQETNKRLCQNARVGDITFLAYNDRSQRYVPSVNVGVSTLGI

SEQ ID NO: 429 - protein, 406 aa, Spirulina sp.
MLSSVGEETQTRKRFITMLRVPVLSPDGKPLMPTKPSRARRWIRDGLAVGKWSDLSVFYVQLTKQPSGEDTQSIAVGVDPGKLYSGVGVQSAKATLFLAHLILPFQTVKDRMEQRRMMRRGRRGRRINRQVDYSKRAHRQKRFNNRRQNKLPPSIRANRQLELRVATELCRLFPVSKIVYEYVKANGSKSFSPVMVGQKVMLGWLSKLAPVETQFGYKTANLRTQLGLVKSKDKSAQTPESHAVDGLALACSELVKYEQFHTANTRGHTWTGSVVLTPSVFRVIRRPPISRRQLHLMVPAQGGIRRKYGGTTTRHGVRKGDVVKAEMAGRVYVGWVSGDTQKKVSVSDANWKRIGQFTASKVQLLARANGLVVSRQPIVGFGDIVHTANTFVPPHPQGDAVSWRFL

SEQ ID NO: 430 - protein, 230 aa, unidentified
  REGION 1..230: note = sediment metagenome
VTWVKEHVEQRRQMRRTRRYRKTPCRQPRSNRARGGLPPSTKARWQWKLRLASWLIKLFPVTTFVVEDIQAKTKGQRRWDTSFSPLEVGKQWFYRQLSELGQVLTCSGWATKQMRDALGLKKTNKKTAEVFKAHCVDAWVLANSAVGGHRLPDNKRMLFLAPLRFHRRQLHRLQPDKKGRRTPYGGTLSLGLKRGSLVRHPKWGLAFVGGSSGNKLSLHRLEDGKRLTQN

SEQ ID NO: 431 - protein, 365 aa, Microcystis sp.
MNRVPVISKDGTPLMPTKPSRARRWIKEGKAIGKFNDLDIFYVQLTTESSNNKTQPIAIGIDPGKLFSGIGVQSSLFTLWKAHLELPFKRVRERMDNRRLMRRGRRGRRINRHIPFNLRAHRQKRFSNRRKAKLAPSIRANRQLELRVVSELARIYPISDIYFEYVKADVDLTSGRKGARSGKGFSPVMVGQKWAIEQLSQLATVHTRFGWQTSNLRKHLRLEKSKNKAEQSPESHANDGIALACFQFLDYLPFHNSNGHGYDWKGYVKVTNAPFAVIKRPPISRRQLHLMVFSKGGKRRKYGGSTTRHGFRKGDLVSSPKGIGYVSGDTEKQLSVSDTSWKRLGQIAVSKIQLIRRSNGLIVSR

SEQ ID NO: 432 - protein, 339 aa, unidentified
  REGION 1..339: note = Ga0373625_0000082
MLFVPVIGSGGKPLMPCHPARARELVRSGRAIRRHDRGLFYIRLVDRADGDVQPIAVGIDPGSKKEAFTVKSEAHTFLNVQTDAVTWVTERMETRRDMRRARRGRNTPYRERRPNRGVKEGRLPPSTRARWDWKLRNCKRLSKYYPVAVFAVEDIKTRSRKGQRRWNKSFSPLEAGKNWFYGELKKLARVETYGGYETKALRDALGLMKTRDKMSDRFEAHCVDSWVLANAEVGGHSKPDHTGIMYVVPLKFHRRQLHRLQPRKDGERAPYGGTISLGFKRGTWVRHPRHGVTYVGGCGKGRISLHGLRDGKRLCKNARPNDCTVLTRCSWRVYTEKEG

SEQ ID NO: 433 - protein, 380 aa, Richelia sp.; identical to SEQ ID NO: 387

SEQ ID NO: 434 - protein, 358 aa, Moorea sp.
MLRVPVISPDGKPLMPTKASRARRWLNQGLAIVYPNDLNVFAVQLVNQPSSYQTQDIAIGIDPGKSFSGIAVQSNKATLWTGHLVLPYKKVRVGMDTRRMMRRTRRSRRINRKIPYSQRSHRQKRFSNRRNKKVPPSIRANRQLENRVVRELNLLYPVSAIVCEIVKANGNKGFSPVMVGQYWAISQLEKIAPVTQKQGWETALKREALGLIKDKIDKSRQTVNTHAVDGIALAATHFYRRKNYYHRNGKLSVPKNCEVTNAVFSVIRRAPISRRQLHLLQFSKGGKRRKYGGTTTSHGFRKGDYVEAVKAGKAYRGWVSGETARQVSVSDINWKRIGQFTARKVRLLKRSTGLIVNH

SEQ ID NO: 435 - protein, 251 aa, Synechococcus sp.
  VARIANT 251: note = misc_feature - Xaa can be any naturally occurring amino acid
IQADAVTWVKEHVEQRRQMRRTRRYRKTPCRQPRSNRARGGLPPSTKARWQWKLRLASWLIKLFPVTTFVVEDIQAKTKGQRRWDTSFSPLEVGKQWFYRQLSELGQVLTCSGWATKQMRDALGLKKTNKKTAEVFKAHCVDAWVLANSAVGGHRLPDNKRMLFLAPLRFHRRQLHRLQPDKKGRRTPYGGTLSLGLKRGSLVRHPKWGLAFVGGSSGNKLSLHRLEDGKRLTQNARKADVRHLSFCSWRX

SEQ ID NO: 436 - protein, 342 aa, unidentified
  REGION 1..342: note = Burkholderiales bacterium
MQYVPVLSSTGQRLMPCHAARVRQLVREGKAVRCFDRGLFYIKLTERVSGDIQPIAVGIDPGSKKEALTVKSASRTYLNIQADAVTWVKDAEETSTNMRRTRRGRNTPYRKMRVNRRQGQFKLPPSTRARWGWKLRLCNWLARYYPIETFVVEDVAAVTKAGKRRWNQSFSPLEVGKLWFYLELEKLAQVKTLKGYETKAERDALGLKKSKQKMSDKFEAHCVDSWVLANWWVGGHTQVDNKSMLYIVPLRFHRRQLHLLQPAKGSIRKPYGSTNSLGFRRGSWVKHPKHGVCYVGGTTAGTISLHSLQTGQRVTKIKPNTVQFLNRSSWRMRKEASHSSPA

SEQ ID NO: 437 - protein, 331 aa, Limnoraphis sp.
MFNKRVPVLNPDGSPVMPTKASRARRWVRDGKAKVVQNDLQVFCVQLLEEPTGRETQDISLGIDPGSCFTGVAVQSKRDTLIGLNLNLPKKRVQKRLEERRVLRRTRRGRRIKRSLLFKKRNHRQKRFDNRRQSKLPPSIRANKQLELRVVDELRQLYPIAHAYIERLNKSDSPGFTVAAQGQTFLIKELGKYFPVALVKGWETSGTREWLKLPKSKNKAEQTPNAHVSDAIALASRHFIRYTPNTTGFQTGYQWKGVIQVTPFTFGIVERLPSRPRKMHDLTVQKGGVRDTYGGFDGTHSFKNGDYVEYKTKRSTLKGYISARTSSFKTP

SEQ ID NO: 438 - protein, 421 aa, unidentified
  REGION 1..421: note = Ga0373625_0162898
MVDKMRTQTRPSGKEAATCGGLRRTSGRLPNPDHFGRTTKCHAGKPAKPAVHGRREILPSVIAGDGVIPQRTRVPVVDKTGRPLMPCLAVRARKLLDNGKAVGAWNKLGIFYIRLKTEKEPKNQPLVVGIDPGSKFEGFSVVGTKDTVVNIMSEAPDWVKKAVERRRDMRKARRFRNTRRRAKRFDNRLAGMRRLPPSTKSRWDAKLRVVTKLKEILPLTGAVVEDVKAVTKKGQRRWNVSFSPIEAGKQYLYNGLEALGLKLNLKQGMETKEARDTLGLKKIKSKSRPVFASHCVDSWVLAASMSGAKLPSTKDIYYLTPLRWHRRQLHMFEPSKGGLRKRYGGTMSIGLKRGTLVRHEKHGLCYVGGCPYERLSLHSASTGRRLCQNAKAADIKLLARVSHRSQFLPALKSGASLGGVL

SEQ ID NO: 439 - protein, 409 aa, unidentified
  REGION 1..409: note = Ga0307928_10003825
METKTTRRELNKTPADAPLICCSVRENIDSMDLKNKRNTLDTPMFSFHLGSGKNSQKRGSISAKVFVLGLDGKPLTPCKYSKARKLLKGKQAKPVWNKFGQFGIKMLIQTKQKTPEIVLGIDNGTKFEGYSIVSEKENNVNIMWLLPDKKMLVRKLKERRILRRARRQRNCRRREARFDNRNRDGFIAPSQLMMVNSRLKAIKELFKSYPISSVAFEDVKFNHRDNRWGKNFTTIEVGKTMIKNFIVDKVGRSNFISFDGTETFEIRNRRGLKKSSNKSLENFNSHCVDSFVIASELVKCKTPKEEIITIDDKYRPKRRRLHDSQFSKGGKRDKYSTGNFKGIRKGTMCEFGQIVGGTKNIVYIRNSDNIRIGKSLNKINWFSKSFKIKNSAIPPTDKSVGLLASNKIL

SEQ ID NO: 440 - protein, 312 aa, Chloroflexi sp.
MQKVFVVDKQGKPLLPCHPARARKLLKQEKAKVVQVVPFTIQLNYTVDNPVGSFKAGVDDGSKYTGVAIVNDKTNEVVFKGQINLRQDVKRLMEQRRNYRRFRRSRKLRYRQPRFNNRRGCKIPPSIQCRKESILRFLRDMMKRINITDVVVEEVKFNHAKYRWGKQFSLVEQGKNYLRKQILDLGLSYGSIFGYDTKVKRLNLGLSKKHSNDAISIVCVEKPIINSFEWIIKPRRTKVWGNNPTKTCEERNGFKHYDLVKAVHRTRGVVIGSVRSLKVKAMTLRTKWDDNFPVSYNKASLLQRFDGLVYIY

SEQ ID NO: 441 - protein, 418 aa, Aliterella sp.
MREVTKTYLSRVIPMKKENLRVPVILPSGEALMPTTASRARRWIKQDKAKPFWNDLGIWCVQLLIEPSGTQTQDIVASCDPGKRYSGIAVVSAKYTLFMSHLVLMGFIPKQGTAIAGIKEKMSYRSMLRRGRRGRRIDRKLVFKLRNHRQKRFSNRKKAKLPPSIRSNRQLEIRVISELSRIYPITAIRVEKVRADVDMTSGRKGAKSGKGFSPVMIGQAWTLEQLSKIAPVVTMEGWQKDGNGTSQIREHLKLVKNKSNKALQVPETHAVDAVAIACGHFVQYKPFHTRNEHGHHWIGEVQNTPSVFKVISKPRITRRRLHNAIPSPEGIRGRYGGSTTPFEARKGDLIEYSTKSNGKVKKLIGYCSGYTGKNLSLSDANWLRLGRFVNSKCRILARNTGLVVSGGLTPTQLPLLSP

SEQ ID NO: 442 - protein, 297 aa, Spirulina sp.; identical to SEQ ID NO: 153

SEQ ID NO: 443 - protein, 286 aa, Prochlorothrix sp.; identical to SEQ ID NO: 391

SEQ ID NO: 444 - protein, 360 aa, Moorea sp.; identical to SEQ ID NO: 60

SEQ ID NO: 445 - protein, 299 aa, unidentified
  REGION 1..299: note = Ga0315280_10050637
PKRFDNRRRPEGWIAPSQKSKVDFRTKVVDELRKLYPVSRFAVEDVKFNHYRKRWGKYFSTVEIGKTTFYEHLRKLGDLGLYTGVQTAEWRGKLSLPKNSRKNSLIWDTHAVDAIAIGCADLGCENPYPPEFRVWKCFEYTHRQLHRLEPDKGGVRRRYGGSWSIPPFRKGDVVSWRDRLARVGGFMGDGVSLHSFGLRNKRFTQTAKIEECTRLYKRCRKPTPFMGGMNAPEGFWVRMAVGELGCEPTNTDCILHGNKKTSYSTSSPSAVISTTAFSSSVRRHTKLRGRHYGRDSSSR

SEQ ID NO: 446 - protein, 378 aa, unidentified
  REGION 1..378: note = Ga0373630_0000013
MLYVPVVDKNQNPLMPTAANRAATWIKSGKATPFWKRGVFCVRLNVDPSGRALQPVAVGIDPGSKKEGFTVKSESHTYLNIQVDAVTWVKDAVEIRRMMRKSRRSRKTPYRQPRFNCARGGLPPSTKARWQWKLRISNWLTRMYPVTCFVVEDIKAVTKVERRWDVSFSPLEVGKEWFYEELRKIAHVETKLGYETKELRDAHGLAKCGNKMLDSFNAHCVDSWVLANWYVGGHIKPDSEQLLLVKPLRFHRRKLHMLQPAKGGLRRRDGGTRSLGFKRGSLVKHPKVGLVYVGGYTRGRISLHSLQTGERIFRTAKPGDCKFLTFNSWRAVLPLPAKAGSLRAAYLMDRIFHRQRQTRRRETRGRSLRAVQPVHLRP

SEQ ID NO: 447 - protein, 364 aa, Planktothrix sp.; identical to SEQ ID NO: 41

SEQ ID NO: 448 - protein, 300 aa, unidentified; identical to SEQ ID NO: 381
  REGION 1..300: note = uncultured cyanobacterium

SEQ ID NO: 449 - protein, 420 aa, unidentified
  REGION 1..420: note = Ga0315280_10061026
MATQGLTSLSRKATPNGLQERQGVSPALTSSEPGRFDAEGLSLSGIGEATNKHSEGSPNIGVGGENMRIPIVSVEGKMLMPTTPTKARKLMRGEQAVGRRSKLGIFYIQMLRPVGDRVQELGLACDPGSMFDGYAVASEKETNVKGMGILPKGIAKKLVNRRQLRRDRRYRNTRRRPCRFDNRRRMDGWIVPSQKAKVDFKLKVMRELCRLYPIANIIVEDVRFNHYKKRWGRFFSTVEIGKEYLYRELERLANLVKVDGWETSEAREKYGIKKVSDKEALTPESHANDAVAMLSKHYCKNVDSPTSFFVWNAYNPVRRQLHKQNPRKGGIRPNYGGTVSKHGIRKGDFVEATVKGEKFHGWTCSFSDTQIGIADFLGKRFAIPTIRNINLVHRATGVLYSEFLSHQTVGLEGVSFGGIR

SEQ ID NO: 450 - protein, 437 aa, unidentified
  REGION 1..437: note = Ga0315298_1008157
MVVSTQVLTRGLGDSRVSGAVGYKDVRMRDLVRTSPAEPLNATVGRKLGLSLRCNLEGRSTPKGGRISPAPRVPVVGVDGRPLMPTTSQRARKLLRGGVAEKRWNKLGQFYLQMLRPVGIKKQPVCLAIDTGSKWDGMAVVTKKQVLTTAELVLPSGIAHKLEVRRQMRRARRYRKTPRRAKRFDNRRRPEGWIAPSQKAKLDFRTKIVDELCRIYPIDRFAVEDVRFNHYKKRWEKYFSTVEIGKARFYEHLRKLGSLSLSLYDGVQTAEWREKFGLPKNPRKSALEWGAHASDAVAIGCAEMGCTDPALPEFWVWKRFQNARRQLHRFELDKGGVRKRYGGSLSVYPFKKADVVLWRGKLVRIGGFMDRRISLHEFNLKNKRITQVAKPEECVYLFNQRIFGARQVPILPTLTDGVSLGVLDEDIYLFLRAIEKW

SEQ ID NO: 451 - protein, 378 aa, unidentified
  REGION 1..378: note = Ga0315294_10133405
MATIGSLSLSYNVEGHKTPKGGRLSPTLKVPVVDIDGKPLMPMTPKRTRKLLKDGIAEKRWNKLGQFYLQMLRQVGTEKQSIHLAIDPGSKWDGVAVVSNRGVLTCGMLVLPSKVAEKLEQRRRMRRTRRYRNTPRRAKRFDNRRRSDGWIAPSQKAKVDFRIKIVDELCKLYPIKRFAVEDVRFNHYKKRWGKYFSTVEIGKAKFYSHLRGLGQLTLYRGVDTAEWRDQFGLPKNSQKNSLTWNSHAVDAIAIGCAELGCENPCPPEFWVWKRFEYAKRQLHRLEPDKDGVRRRYGGSWSLPPFKKGDVVQYQNRLARVGGFMDGLSLHGFGLRNKRFTQTAKPEDCNRLFNQQIFSKYENPQFLPPINGVGFLGGF

SEQ ID NO: 452 - protein, 371 aa, unidentified
  REGION 1..371: note = Ga0373630_0072462
MPVSVEGLNTARLSQGPLATNLGNKGNRMIFSVPVVDQSGTPLMPTYLRRAEGWVRTRKATPFWSRGVWCVRLNVEPSAKHLDPVAVGVDPGSKREAFTIKSKARTHLNVLAHAVDWVKDAVEIRGNMRGGRRFRKAPCREPRFDNRKRKGMPPSTKARWQWKLRIAKWLTRMFPVSGFVVEDVRARTKGRRKWDVNFSPLEVGKSWFYGELKKLAPVITRQGWETKVLRDRLGLRKTHSKLAEKFSAHNVDSFALAWDMVGGDGKPDDESLLILAPLRFHRRQLHAFQPSKNGVRRPYGGTRSLGLKRGSLVRHPKHGLCYVGGTSKGMLSLHSLSDGKRICQRAKKEDVSFRGFGSFRFYGKGMTPKAS

SEQ ID NO: 453 - protein, 364 aa, Planktothrix sp.; identical to SEQ ID NO: 41

SEQ ID NO: 454 - protein, 381 aa, Crocosphaera sp.
MSNKVTRVPVTDPVGKPLMPTTPARARKWIKSGKAIPKRNKLGVFYVQLTVEPSGHQTQEIIVGTDRGKAFTGIAFQSKLATLIVFHLCLPGFYKSKKTKKDRQSVTGKMAKRTELRRSRRARRIDRTKPFKLRNHREKRFSNRRQSKIPPSVLANRLMELRVLQEMSKLLPIAEIRDEDCGGYTIKNGRGISPVTVGQEWFRKEAGKIAPIVPLDSKTTGSFREQLGLIKEKKHKDKQCIESHGNDAIAIASSYFIKYQSFHRGNNHGHEWIGKCLVTQTPFIVLTRPKLFRRKLHQEQYKKGGILKRQGGTITPFGFLRSDYVETSRKGQIIRGWIGGFTNSKSSKNVSIYDHNWKRIGQFNPKNVCLINRSSKLCIAT

SEQ ID NO: 455 - protein, 344 aa, Scytonema sp.; identical to SEQ ID NO: 19

SEQ ID NO: 456 - protein, 399 aa, unidentified
  REGION 1..399: note = Ga0315285_10055136
MNTTTTRIELQERQSASLALPSSEESFNSTISDEPDNRGDAKSKFCSHLRSEYNSEDRASMSGRVFVLDVNGLPLTPCKMSKARKLLEGKQAVPVWNKFSQFGIQMLVDTRKETPKIVLGCDFGTKFEGYSVVSGTENVFNVMWKLPDKKKLVKKLEERKALRRARRFRNCRRRACRSDNRSKKGFIAPSQLQIITSRLRCISELFNCYPFDAAVIEDVCFNHRDKKWGKNFSTIEVGKKMLYDFLRAKVGTGNLIQFGGYDTQGFREKLGLKKSGDKSTKNFSSHCVDSFVIANELSKANPNMSLVFVDDNYRFVRRRLHDTQPARGGIRANYSSGIFKGIRKGSMCEFGQIVGGTKEQVWYCDFELQDNGRKIYQKGKMLNKISWLSHHFKSEVISG

SEQ ID NO: 457 - protein, 337 aa, Microcystis sp.; identical to SEQ ID NO: 346

SEQ ID NO: 458 - protein, 317 aa, Planktothrix sp.; identical to SEQ ID NO: 127

SEQ ID NO: 459 - protein, 289 aa, Moorea sp.; identical to SEQ ID NO: 411

SEQ ID NO: 460 - protein, 365 aa, Aphanothece sp.
MQRVPVISKEGKPLMPTKPSRARRWLNEGKAVGKFNDLNIFYVQLTTEPSNNKTQPIAIGIDPGKLFSGIGVQSSRFTLWKAHLELPFKRVRERVDNRRLMRRGRRGRRINRKLSFDLRAHRQKRFSNRRQGKLAPSIRANRQLELRVISELTRIYPICDIYFEYIKADVDLTSGRKGAKSGKGFSAVMVGQKWAIEQLSKLATVHTRLGWQTSNLRKHLGLEKSKNKAEQSPSSHANDGITLACFQFLDYLLFHTSNGHGHDWKGSVEVTDSPFAIVKRPPISRRQLHLMVPSKGGKRRKYGGSTTRHGFGKGDLVSSPKGVGYVSGDTEKQLSISDTNWKRLGQIAVSKIQLIRRSNGLIVSH

SEQ ID NO: 461 - protein, 396 aa, Microcoleus sp.
MLRVPVLSKSGKPLMPTKPSRARRWLKKGKAKIAHNDLECFAIQLTFETEENTQPIAVGIDPGKHYSGIGVQSGSVTLWMGHLVLPFKTVKERMELRRVMRRARRGRRINRKLPYDQRCHRQARFDNRRQGKLPPSIRANRQLELRVVNELFQLFPISAIHYELVMADVDRTSGRKSAKSGVGFSPVMVGQKQMLNWLRELAPVTTHQGWQRDGNGTSQLRQWLGLAKDKKDKSSQTPATHAVDGVTLAAFEFTQWREWHLTQAKHGGWVGDVHVTPAPFAVIRRPPISRRQLHLCVPSKGGVRRKYGGTVTRHGIRKGDQVIAEKAGKTYIGWCSGDTKAQVSVSDKNWKRLGQFTAKKVQLLQRSTGLIVRIERSRNVVPSPGLSNLPLLKGLI

SEQ ID NO: 462 - protein, 348 aa, Scytonema sp.; identical to SEQ ID NO: 1

SEQ ID NO: 463 - protein, 364 aa, Planktothrix sp.; identical to SEQ ID NO: 41

SEQ ID NO: 464 - protein, 351 aa, unidentified; identical to SEQ ID NO: 180
  REGION 1..351: note = Oscillatoriales cyanobacterium

SEQ ID NO: 465 - protein, 389 aa, unidentified
  REGION 1..389: note = Cyanobacteria bacterium sp.
MQRVSVISPDGRPLMPTKPSRARRWLKEGKAKIYPNDLQVFAIQLQNEPSGYETQDVVIGIDPGKLFSGVGVQSSKATLLKLHLILPFPNVTKKMTSRRILRRARRGRRINRKLPYDQRCHRAKRFDNRVAKKLPPSIRANRQIELRVVKEVCRLFPISNMVYEYIKARGDKGFSPAMVGQKVMLEWLEKIAPTATQFGWQTSNLRQWLKLPKDKADKSKAVEETHSNDGVALAASHFIKWQEWQSSNARGGNWDGEVFITPAPFKVIAKPNIYRRQLVFENPDSHKPNPNQYRKRKGGTITPFGFRSGDFVQAQKAGQITRGWIGGYTQTDKSKNVSVYDHNWKRIGQFSPNKVKLLKRSCKLCVQAWRGVGCLHSSGIPLSLPRLLR

SEQ ID NO: 466 - protein, 352 aa, Scytonema sp.; identical to SEQ ID NO: 23

SEQ ID NO: 467 - protein, 337 aa, Microcystis sp.; identical to SEQ ID NO: 265

SEQ ID NO: 468 - protein, 384 aa, Scytonema tolypothrichoides; identical to SEQ ID NO: 422

SEQ ID NO: 469 - protein, 365 aa, Microcystis sp.; identical to SEQ ID NO: 279

SEQ ID NO: 470 - protein, 335 aa, unidentified
  REGION 1..335: note = Ga0315284_10013381
MVPVLDLKKIPLMPCTEKRARELMEKGDAKAYWKNGIFCIILQREPSARNYQEVIIGIDPGSKRTGITTTTEKRVICNQLFDAPSEVKKKVEFRKILRKSRRSRKTPYRKCRSNRKIGGVPPSTKARWGAHLRVIDFWKKLIPITVVSLEDIKAETKKYQRKWNKNFSPLEVGKKWFENEVVNRGYKFYKFEGFKTKEQRDHRGFKKTSLKLRDSWDAHNVDSHCLCELALGDIKPFFGILKCEFFKWSRRQIHVSNPQKGGVRKQYGTTRSLGLNRGTLVKHKKLGLTYVGGTSKRGLSLHDVKTGKRLTQDAKKTDCVLLSNIRWRTQISPLD

SEQ ID NO: 471 - protein, 382 aa, Geitlerinema sp.
MRVPVVSKEGVPLMPTQPSRARRWLKEGKAVKKWSDVGVFYVQLTVEPSDTQTQEVAVEVDPGKHFSGVAVQSAKATLFMAHLILPFETVKKRMEQRRTMRRTRRSRRINRNAPFKFRNHRSSRFNNRRQNKLPPSIRANRQLELRVVRELAAIFPISTIVWEYVRADVDRTSGRRKARSGRGFSPVMVGQRWAIREMGKIAPVVQLQGWETANLRRELGLVKSGNKDDASPESHAVDGIALASSQFVRYESFHGTNVRGHRWKGSVCITPTLFRVIRRPPICRRQLHLLQPAKGGTRRKYGGTVTRHGFRKGDFVRASRAGRQYLGWVSGDNARQVSVSDINWKRLGQFSASKVQLLAPNTNLLVLGTSNPTRPAFCSSRA

SEQ ID NO: 472 - protein, 365 aa, Microcystis sp.
MARVPVISKDGKPLMPTKPSRARRWIKEGKAIGKFNDLDIFYVQLTDEPSDNKTQPIAIGIDPGKLFSGIGVQSSLFTLWKAHLELPFKRVRERMDNRCLMRRGRRGRRINRQLPFNLRAHRQKRFLNRRQGKLAPSIRANRQLELRVVSELTKIYPITDIYFEYIKADIDLNSGRKGAKSGKGFSSVMVGQKWAIEQLSQLATVHTRFGWQTSNLRKYLGLEKSKNKAEQSPESHANDGIALACFQFLDYLPFHTSNEHGYDWKGYVKVTNAPFAVIKRPPVSRRQLHLMVFSKGGKRRKYGGSTTRHGFRKGDLVSSPKGIGYVSGDTEKQLSVSDTSWKRLGQIAVSKIQLIRRSNGLIVSH

SEQ ID NO: 473 - protein, 365 aa, Microcystis sp.
MARVPVISKDGKPLMPTKPSRARRWIKEGKAIGKFNDLDIFYVQLTDEPSDSKTQPIAIGIDPGKLFSGIGVQSSLFTLWKAHLELPFKPVKERMDNRRLMRRGRRKRRINRQLSFNLRAHRQKRFSNRKQGKLAPSIRANRQLELRVVSELTKIYPITDIYFEYIKADIDLTSGRKGAKSGKGFSSVMVGQKWAIEQLSQLATVHTRFGWQTSNLRKYLRLEKSKNKAEQSPESHANDGIALACFQFLDYWPFHNSNSHGYDWKGSVKVTNAPFAVIKRPPISRRQLHLMVFSKGGKRRKYGGSTTGHGFRKGDLVSSPKGIGYVSGDTEKQLSVSDTSWKRLGQIAVSKIQLIRRSNGLIVSR

SEQ ID NO: 474 - protein, 344 aa, unidentified
  REGION 1..344: note = Oscillatoriales cyanobacterium
MFVPVVNSDNRPLMPTTNARAKRWIKSGKATSFWKKGVFCVRLNAEPSNHNYQPIGVGIDPGSKREGFTVKSKSHTYLNIQTHAVDWVKYRVEVRRNMRRSRRFRNTPCRQSRANRLVNKNRIPPSTKSRWQWKLRIVNWLALMFPLSTFVVEDIKVPTWKNGRKWNVSFSPLEVGKHWFYDQLRKIAHLEIRSGNDTYELRQDLGLKKSKQKLSNKFSAHCVDSWVLANWYAAGHIQPDNSSLIEIVPLEFHRRQLHRLQHSIGHIRSRYGGTMSAGFKRGSIVKHPKHGFCYVGGWQESPTKKDPYRKRISLHELKTDKRLTQNTSPCDCKFLSYNSWRIAN

SEQ ID NO: 475 - protein, 364 aa, Scytonema sp.
MRVPVLDKNGKPLMPTKPSRARRWLKESKVRVVYNDLNVFCIQLLVEPSGYDQQPIAFGLDTGKKFTGVGVQSAKFTLFMAHLILPFSDITKKMSRRLILRRARRGRRINRKIAFHKRAHRQKRFDNRKQNKLPPSIRANKELELRITKELVKLFPVTQITYEYVKARGDKGFSPVMVGQKVMLQWLEEIAPTSIQEGWQTSIIRQQLGLAKDKKNKEKQTPETHAHDGIALAASNFMKFEKFHTTNSRGSHWVGKVIVTSAPFRVIARPNLFRRQLHFENPVSGAPSNRKRKGGTITPFGFRSGDLVKAEKAGKVYIGWVGGYTQTSKTKNISVYDHNWHRLGQFSPSKVQSIKRSTRLCVAS

SEQ ID NO: 476 - protein, 366 aa, Moorea sp.
MLRVPVISPNGKPLMPTKASRARRWLKQGFAVVYPNDLNIFAIKLVNQPSGSQTQDIAVGVDPGKLFSGIAVQSQTTTLWTGHLVLPYKRVRDRIDTRRIMRSRSVGFAERTRRSRRINRKVSYSKRAHRQKRFENRIAKKVPPSIRANRQLEFQVVSELFRLYPVKAIVYEVVKARGNKGFSPVMVGQHWAISQLQQMAPVTRKQGWETALKREGLGLTKDKTDKSRQTLETHGVDGIALAATHFFRRRNYYYRNGKVSFPENCTVTNALFAVVRRAPISRRQLHLLQFSKGGKRRKYGGTTTRHGFRKGDYVEAVKAGKTYRGWVSGETAKQVSVSNINWKRIGQFSARKVRLLKRATGLIVNY

SEQ ID NO: 477 - protein, 386 aa, Scytonema sp.
VRRRDAATKMTGGTLPKITNTVYWVIPNIPNKGMKNQNRQVTRVPVVSPDNKPLMPTTGARARKWIESGKAIPKRSVIGIFYVQLNSEPSGHELQDIAASTDRGKCFTGIAFQSKLATIAVIHAVLPGFYKSKKKKKDRQSITGKMAKRKELRRSRRGRRIDRTKPFKIRNHRQKKFNNRRGSKLPPSVRANRLMELRILQEAIKIIPYCTLRDEDCGGDTQKNGCGISPLTVGQEWFRKEISKIVLVVLVDSRNTEGLRNQLGLIKDKSDKSKQTIETHGNDAIALAANHFIQYVPFQTANTHGYHWVGMCKVTPTPFIVMTRPKLFRRKLHQEEYQKGGILKRLGGTITPFGFRSGDYVRTTQKGKNIRLFSTCYFSITSTEEP

SEQ ID NO: 478 - protein, 369 aa, unidentified
  REGION 1..369: note = metagenomes
MGYTKMRIPVVDSNHEPLMPTTSARARKWLDSGKAVKRWSDCGQFYVQLTVEPSGYAVQAIVIGIDPGKKYSGIGVQSAKFTLYTAHLILPFQTVRDRMDARRLMRRSRRGRRINRTVAFNQRAHRQKRFANRRQGKLAPSIRANRQLELRIMSELCKLYPVAEIRYEYVRADVDLTSGRKKARSGKGFSAVMVGQKWMLKQLEAFAPVITIYGYQTSVTRKHLGLTKNKADKSKAEFNTHAVDGVAIAASHFVEYRQYHKAGEDGADWFGSVSITPAPFFVIRRPPYSRRQLHLMVPAKGGVRRKYGGSTTRHGVRKGDLVNSPKGIGYVSGDTEKQISVSEANWKRLGQIASSKVQLIRRSNGLIVA

SEQ ID NO: 479 - protein, 410 aa, Mastigocladus sp.
MLRVSVLSPSSQPLMPTKASRARRWLKKGKAKIAHNDLGIFQIQLVVKPSGTKTQSIAVGIDPGKHYTGIGVQSAKLTLWLAHLQLPFKTVRERMKQRAMMRRRRRGKRINRKIAFTKRAHRQKRFDNRRQCKIPPSIRANRELEIRVFKELIKIYPVSDVAYEIIKACGDKGFSPVMVGQNWALNFYLHCPLQNGAGLYCYYPMGPTSYSLAKPAPFCYVEDPHYACGWFWKLHKIEGWQTANIRQHLGFNKQKHSKGDAIPATHAVDGVALAASAFIRYGVTSSKSQGWIGEVAITSAQFTIIRRPPISRRQLHLMVPAKGGVRRKYGGTVTRHGFRKGDYVEATQGNKTYFGWVSGDTEKQVSVSDQNWKRLGQFSKNKVRLVQRSTGLIVLPTRKLSNLMASNHQV

SEQ ID NO: 480 - protein, 348 aa, unidentified
  REGION 1..348: note = Ga0373627_0087747
VSKQAGVSLILGVKMLVPVLSKDQQPLMPTTKHRAMKLVASREATPFWKRGIWCIRLNREPSGYAMQSVVIGVDPGSKKEGFSIVSEANTIANFQADAVTDVKEAVETRRNMRRARRFRNTPCRKNKSNRAKSPFPPSTKARWDLKLRIINFLAKLYPITHVIVEDVKARARKGCKKWNKSFSPLEVGKKYFYEALSSRYILRIRQGWENSEFRKELGLKKLNNKLSNDFHAHCVDGFCLAKWFIGGDNEPTSKQVGLIKPFKFSRRQLHVFQPAQGGERKNYGSTRSMGFKRGSIVKHEKYGICYVGGTSKARITLHNLFDGSRLSRCIKSEAVQFKAYSPWSLNYA

SEQ ID NO: 481 - protein, 314 aa, uncultured Microcoleus sp.
IKSGKATPFFRKGIFCVRLNVEPSNRHTQPVAVGIDPGSKREGYTVKSKAHTYLNQQFHAVDWVKDAEQTSTNARRARRNRKTPCRQPRQNRSRGGLPPSTKARWQFKIRVVKVFDTIFPLSGIGIEDVKALTKKGCYKWNTSFSPLEVGKKWCYSELEKIAPVTQFDGYTDTYLTRQRLGLKKSKAKLSNVFDAHCVDSWVLAYLLVGGDISPENMVVMECKPIRIYRRQLHVFNPGKNGYRRPYGGSMSQGLKRGGIVKHPKYGKCYVGGEDAKKSRISLHSLGTGKRLCQNAKPTDCKFLAYNSWRTVKPS

SEQ ID NO: 482 - protein, 384 aa, unidentified
  REGION 1..384: note = sediment metagenome
RVKYVANASQVCNRYVGQPRREKLPVNAERQRQSPGLKSPVWVPVTSSTGSPLMPCRPAYATALIRLGRAKRRWFKGIFAIQMLDRAEGSVQQVACGIDPGSKREAMTVQSKQHTYFNELSDAVTWVKDRVEVRRNMRRARRFRKTPCRTPRANRNINSKRLPPSTKSRWQAKLRIINFLRKLYPITDYVVEDIKAKTWKGSKKWNRSFSPLEVGKAWFYDEVSKLGNLIMKQGWETSERRNLLGFKKSSAKMAETFDAHNVDSWVLASFVTGKSVIDNKAIFRMIPLQLHRRQLHRFEPDKGGVRRPYGGTLSMGMKRGSVVNHTRLGRVYIGGTTREKVSLHDLITGERLTKCGSVKDCSFLHFNSWRTSWVDEYGLVSSNG

SEQ ID NO: 483 - protein, 362 aa, unidentified
  REGION 1..362: note = Ga0315280_10033276
VEGYKNGGMRDLVPPSSAEPLNAMAGRKVSLSLPCSDEGRSTRTGEPVIAIGRVPVVSASGKPLMPCRPSKARKLLAKNLAEKRWNKLGQFYLRLKFDPRSKPNNGQQICLAVDPGSKWDGIAIISKKGVLTSGMLVLPSRVAERLKQRREIRRARRYRKTPRRAKRFDNRRRSEGWIAPSQKAKVDFRIKVVDGLCKIYPISRFAVEDVRFNHYRKRGGKHFSTVEIGKARFYQHLRSIGSLNLYDGVQTAEFREKLGLRKNSIKRELSWDTHAVDAIALGCLEIRCENPYPPEFWVWKRFEYARRQLHRLEPSEGGVRRRYGGSWSIYPFKKKVMWCGGMVSSLGSEGIWMDRYRCTPLD

SEQ ID NO: 484 - protein, 346 aa, Leptolyngbya sp.; identical to SEQ ID NO: 238

SEQ ID NO: 485 - protein, 370 aa, unidentified
  REGION 1..370: note = Ga0307928_10002244
MFALARRHKRDARPGCVSAKFWQGIGMRIPVVSIESKPLMPTISSRCRKMLRDGVAEKRWTKEGVFYIRMLIYVREETQEMALAIDPGSKFDGYCVSGSEEIVLMGMSVLPSRVKKRMETRKMLRRSRRGRKCRRRKARFNNRKHKDGWIAPSQLAKVQLRTRVMERLCRIFPITDIIIEDVKFNHYKHRYGKWFSTVEIGKTKVYAAAEELATLWLPRGWDTAQARKDYSIEKCEQKSKLSPKSHANDALAMCCWLYGWKPRNNTNEFYVWRRQGYSRRQLHLQNPATGGKRRNYGGTVNVSSLLRKGDVIRCHCEIVGYVGGWTRKGKTISLTGVRGKRLLKVGISKIELLARSPNILTERRTAHFSP

SEQ ID NO: 486 - protein, 364 aa, Prochlorothrix sp.
MRIPVVDKDHKPLMPTTPARARKWIASGKALKRWSDCGQFYVQLTVEPSGRDTQSIVVGVDPGKLYSGIGVQSAKFTLYTAHLVLPFQKVRDRMDNRRMMRQARRGRRINRKVSFSKRAHRQARFSNRRSGKLAPSIKANRQLEIRVVSELCRIYPITQIRFEYVKADVDLTSGRKRACSGKGFSAVMVGQKWAIQQLEQLAPVVTIFGYQTSITRKYLGLEKNKVDKSKAEYETHAVDGVALAASYFVEYRKYHRQDTDGGDWFGGVGITKAPFFVVRRPPCSRRQLHLMVPAKGSVRRKYGGSTTRHGVRKGDLVKSPKGLGYVSGDTEKQVSVSAASWKRLGQISVSRVQLLRRSNGLVVA

SEQ ID NO: 487 - protein, 333 aa, unidentified
  REGION 1..333: note = Candidatus Poribacteria bacterium
MPLHAARARKLVKRGEATPYFNNGIFCIRLNKEPSDRETQEIAVGVDPGSQKEGFTVKSEKHTYLNVQADAHNKVGKKVSKRRELRKSRRSRKCPNRQNRMNRLANKEHIPAGIRARWDWKLRILDWLSKMYPLTDVCVEDIKAKTLRNAKRWNQSFSPLEVGKAWFYGKVCERWNLHTLAGHKTKALREGLGLKKSSRKLSETFNAHCVDSWCLAYHTVGGDGRVDNTRLFCISPLPIQRRNLHREIAKKGGKRPRYGGTRCLGLTKGTLVRSIRWGLCWISGHQNGKINLTQMETGKQRSTQKCDSFHLLKRLNFRYKPASKEHKITQSVV

SEQ ID NO: 488 - protein, 257 aa, Microcoleus sp.
MADVDKTSGRKSARSGIGFSPVMVGQRQMLNWLSKLAPVVTHKGWQRDGNGTSQLRQWLGLAKDKKNKANQTPATHAVDGVTLAAFEFTRWQEWHSDNAKHGDWSGYVQITPAPFAVIRRPPISRRQLHLCVPSKGGKRRKYGGTVTRHGFRKGDKVIAEKAGKTYVGWCSGDTERQVSVSDANWKRLGQFTASKVQLLQRSTGLIVRRQAKSKCRAFNWIVKSPLIERVDLTSIPLHPPEPAKDLLRVESHAKYDE

SEQ ID NO: 489 - protein, 367 aa, Scytonema sp.; identical to SEQ ID NO: 14

SEQ ID NO: 490 - protein, 334 aa, unidentified
  REGION 1..334: note = freshwater metagenome
MRIFVLSKSGKPLMPATQAKVRKLLKAKAAKPVWNKFGEFGIQLLTETSEIIQNISLGVDVGTKFEGYSVSSKNENLLNIKLNLPDKSNIKRKMEERSTLRRTKRRHKLRSRKARYNNRVRVGFIAPSQLVVIKSRLKILRELFKIYPISVIGLEDVCFNHYEKRWGKNFSTMEIGKNKLRAFLKEKAKLFEFKGYKTKELREKYGYKKISDKSKNVFESHCCDSLALACEVLTGSRIEPNKKLTVVDDTYRPVRRKLHKVIPIKNNIRKSCGRGTVFGLQKGKIIGYKGKEYLLTGVYKNTKYRISNKETKTPCNHIKKFSYISKNFNFIKVN

SEQ ID NO: 491 - protein, 352 aa, Tolypothrix sp.
MQRVPVLTPSLKPLMPTKASRARRWLKLGKAKVVYNDLGIFQVQLVTCPRAIEAQPIAVGIDPGKLYSGVAIQSAKFTLWTAHLQLPFEIVKKRMEQRAMMRRGRRGRRINRKLPYNQRAHREKRFNNRRQSKLPPSIRANRELELRVLDELSLIYPLTYIAYEIVKARGDKAFSPVMVGQKWQLENLEGYGNVREIEGWQTSQIRQQLGLQKQKHSKGDAIPTTHAVDGVALACSAFIQYGVTSTHSMGWRGEVTVQSAPFAVIRRPPVSRRQLHLMVFAKGGVRRKYGGTVTRHGFRKGDLVQSPKGIGYVSGDTEKQISVSDANWKRLGQIASSKIQLIHRSNRLIVTY

SEQ ID NO: 492 - protein, 339 aa, unidentified
  REGION 1..339: note = Candidatus Poribacteria bacterium
MFVPVKTKDGQQLMPLHAARARKLIKKGEATPYWSNGIYCIRLNKEPSDRETQEICVGVDPGSKKEGFTVKSEVHTYLNIQADAHTHTSKKVKNRRELRRGRRSRKCPNRKKKPHNLSNMKRIPAGTRARWDWKLRILNWSSKLYPVTQVCVEDIKARTKQYQKKWNQSFSPIEVGKQWFYSEIEKRWQLHTLLGHETKDIRDKLGLKKSKDKKAETFNAHCVDSWCLAYHVLGGDPIVDNTDIFCISPISIQRRNLHREIPKKGGIRTRYGGTRCLGYTKGTLVKSIKWGLCWISGHQNGKINLTQMTTGKHRPQQKLESFKILKRLNFKYKVATSPS

SEQ ID NO: 493 - protein, 254 aa, Moorea sp.
MLRVAVISPDGKPLMPTKASRARRWLNQGLAVVYPNDLNVFAVQLVNQPSGEQVQDIAVGIDPGKMFSGIAVQSNKATLWTGHLVLPYKKVRKRMDTRRMMRKTRRSRRIDRRVPYSQRSHRQKRFSNRVNKKVPPSIRANRQLEQRVAKELSLLYPVKAIVYEVVKARGDKGFSPVMVGQYWSISQLEKIAPVTQKQGWETALKREALGLVKDKTDKSRQSLNTHGVDGIALAATHFFRRKNYYHNKGKLSVP

SEQ ID NO: 494 - protein, 364 aa, Anabaena sp.; identical to SEQ ID NO: 123

SEQ ID NO: 495 - protein, 358 aa, Moorea sp.
MLRVPVISPDGRPLMPTKASRARRWINKGLAVVYQNDLNVFAVQLVNKPSGEETQDIAVGVDPGKRFSGIAVQSNKTTLWTGHLVLPYKKVRDRMDTRRMMRRTRRSRRINRKVCYSQRSHRQKRFSNRREKKVPPSIRANRQLEQRVIKELSLLYPLRVIVYEVVKARGSKGFSPVMVGQYWSISQLERIAPVIQKQGWETALKREALGLVKDKADKSRLSVNTHAVDGIALAATHFFRRKNYYHSNGKLSVPRNCDVTDATFYVIKRAPISRRQLHLLQFYKGGKRRKYGGTTTSHGFRKGDYVEAVKAGKQARGWVSGETARQVSVSDINWKRIGQFTARKVRLLKRSTGLIVNH

SEQ ID NO: 496 - protein, 314 aa, Moorea sp.; identical to SEQ ID NO: 58

SEQ ID NO: 497 - protein, 333 aa, unidentified
  REGION 1..333: note = freshwater metagenome
MQKFVPVLSNNNKPLMPTTPMRARQLLKSSRAVKRWFKGVFAIKLIDTNNGDIQEIVVGLDPGSKREGFTVKSYFHTYLNIQTEATDYVKDKIKTRREMRRNRRNRNTPYRKCRLNKNRNKKFLSPSTKARWQAKLRILNYLNKIFPLKLIIVEDIKARTFKKARKWNLSFSPLQVGKNWFYSKIKEKWKLILRNGYETKEKRDELGLKKKSNKLSVNFYSHCVDSWVLANSYIEGHHSVDNEEVIVMNPIKFIRRQLHNLKFSKNSIRSRRGGTLSLGLKRGSVVKHVKYGICYVGGHSNNRVSLHAFGTGKRLSQFAKLDDIKFLAYNSWK

SEQ ID NO: 498 - protein, 388 aa, Spirulina sp.
MQRIPVQNPDGTPAMPTKRNRAQKWVTQGKAQWVKTDLRIKAVRLKEEPSGRNTQPVVVGVDPGKLYSGIAVQSAQATLFQSHLELPYPKVRERMDNRRMLRRSRRSRRINRELPFPLRNHRQQRFNNRKQQKVPPSIRANRDLEFRVVQELSQLFPIANLGYEKVRADVDLTSGRKGARSGKGFSPVMVGQAYAIEKMEQIAPVYTRYGWQQDGNGTAQLRSALGLKKSQDKAAQIPQTHAVDGVALACGYFIEYRPFQRKRSHGYLWFGQVKLTSAPFVVIKRPPISRRQLHLMVPRKQGLRRKYGGTVTRHGFRKGDLVRAEMAGRVSVGYVSGDTARQVSVSGFTWKRIGQFSAAKVELLYRATGILVSCPQRLSVSGAFNPTD

SEQ ID NO: 499 - protein, 369 aa, Planktothrix sp.; identical to SEQ ID NO: 147

SEQ ID NO: 500 - protein, 386 aa, unidentified
  REGION 1..386: note = Ga0315284_10121961
LRERDYKKRIPVVYRNKPLMPMRWGRVNKYLKLGKGVLKYGKLGILYFKLTSKPTELKTQEIVLGIDPGASYDGFSVVSKYLHHENVNTEHTRDIKKRMAKRALFRRIRRSRLWHRKARFDNRTASKLPPTILSKVNFRKWIIIKLSQLYPINKAVIEDVKFDHSKDPAGKFYSLVELGKNALYNWVEDRFELEVFDYKLTRDLRIEIFGEDLKSKEVQKSFYSHCIDSFSIVKKYSGCLNVNTNIRYVTKIWMSRRELFREKNKIKDACKHFKFKKGGEKFYFEKVSKVRKIRVKLNDSKSNHGPWEYQLTKPTVCYKKFKSRYGGTIKQGNSRSTVPTGKSKYSVFKGGRLVCYHKQKVERVLSPSLELISSQFLPPINRRVSL

SEQ ID NO: 501 - protein, 360 aa, Moorea sp.; identical to SEQ ID NO: 60

SEQ ID NO: 502 - protein, 342 aa, unidentified
  REGION 1..342: note = Candidatus Poribacteria bacterium
MFVPVTSQTGKKLMPTHANKAGMLIKKGLATPYWSNGIFSIRLNYATEGEYTQDIAVGVDPGSKKEGFTVKSEAHTYLNVQADAHKGVGKKVAKRHELRRGRRSRKCPNRKQRKNRGANKERIPAGTRARWDWKLRILDWLSKLYPVTHVCVEDIKARTIEHAKKWNQSFSPLEIGKQWFYTEVEKRWQLLTLQGWETREIRDRLGLKKSSKKLSETFSAHCVDSWCLAHHTVGGVSIPENTDIFCIAPIPIKRRCLHREQEAKGRQRNRYGGTVLGNGLVKNTLIKHVKYGFTRLVGVNAKGLFSIYTLEGKRLTTSAKRNDFRVLTRLNFNYRSGHSSPS

SEQ ID NO: 503 - protein, 392 aa, Okeania sp.
MTRVPVQNPDGTPAMSTKASRARRWVRDGKATGHWNDAGIYYVRLVVEPSGRKVQKVTIGVDPGKSYTNIAVQSAKATLYLAHLVLPFQRVKERIGAATIKNGKVIKNARGRALHRRVRRGQRINRKIPFEQRAHRQKRFDNRRRDGKIAPSIRAAREMDLRIVSELSKIYPVGSIVYEVIKADVDLTSGRRGARSGKGFSPVMVGQKWAIKQLQSIATVKTVLGWQKNGNGTSQIRKHLELTKIKDKKAQTPESHAVDGIALAATEFIRFGLVPKIGYDLHTWIGSVTITSAPFRTIARPEYFRRALHFDKADKGGKRKRKGGTITPFDVRCGDRVMATKSGETVIGWVGGYTQTAKSKNISVYDHNSKRLGQYAPSKVRLIRRSNKLCVA

SEQ ID NO: 504 - protein, 381 aa, Microcoleus sp.
MIRVPVLSPKGKPLMPAKASRVRRWLKAGKAKVVHNDLGIFQVQLTQPPSGEETQDIVAGIDPGKLFTGIAIQSAKTTLFLAHLKLVFKNVTKRMNQRAMMRRGRRGRRINRKLPFDQRSHRQHRFNNRRGNKIPPSIRANKQLALRVIQELSRVYPFQDIVVEVIKARGDKGFSPAMVGQYWQIEQLEQAGYTVHTQEGWHTSTLRQYLGLPKSKNKAEESPAAHAVDGICLAASQFMRYRQIKGRSGTFNGGIAVTPCQFAVISRPPICRRQLHLMIPSKGGLRRNYGGTVTRHSGLRKGDYVKAEKAGITYYGYVSGDTKTKVSVSDANWKRLGQFTAKKVQLLQRNTGLVSTVGLSNLTTLNFDRLNCREVEVSGTV

SEQ ID NO: 505 - protein, 343 aa, unidentified
  REGION 1..343: note = Candidatus Poribacteria bacterium
MFVPVVDKDQNPLMPTKPSRARKWIRDKKATPFWKNGIFCVRLNVDPSDRYFQDIGIGVDPGSKKEGFTVKSENHTYLNVQADAHNKVGKKVAKRRELRRSRRARKCPNRKNRTHRLANSARIPAGTRARWDWKLRILHWLSKLFPITHVCVEDIKARTIERAKKWNQSFSPLEVGKQWFYTEIEKKWQLLTLQGWETQEIRDRLGLKKSSKKLSETFDAHCVDSWCLAYHAMGGASIPENTDIFCIAPIRIKRRELHRQKESKGRIRSRQGGTVLGNGLVKNTLVKHDKYGLTRLSGVNARGLFSIYNLEGNKRLTTGAKRSDFRLLTRLNFNYRNGHSSKV

SEQ ID NO: 506 - protein, 377 aa, Scytonema sp.; identical to SEQ ID NO: 38

SEQ ID NO: 507 - protein, 379 aa, Chlorogloea sp.
MRIPVVTADGQQLMPTKPSRARKWIRDGKAIGKFNDLGQFYVQLLGKASGTDTQDIVIGIDPGKLYSGIGVQSSKNTLFTAHLQLPFKTVRERMETRAMMRRTRRGRRINRKVAFDKRAHRQKRFDNRRGSKLPPSIRANRQLELRVVSELCKVFPVTGIVYEIVEAKGSKSFSPVMVGQKIMLQWLALFAPVTTKKGWETAQIRTQLGLEKQKHSKGDAIPATHAVDGVALAVSAFINYGIINRHSMGWLGNVSVTPAPFGIIRRPPVSRRQLHLMVFAKGGVRRKYGGTVTRHGLRKGDLVQATQGKKTYLGYVSGDTEKQVSVSDANWRRLGQFTASKVRLIRRSTGLIITAVKTACVASLSALKMTEFPASHEVL

SEQ ID NO: 508 - protein, 365 aa, Microcystis sp.; identical to SEQ ID NO: 274

SEQ ID NO: 509 - protein, 389 aa, Leptolyngbya sp.
MQLRVPVIDSTGTPLMPTKPSRARRWVRDGKAEGRWNDAGIYYIRLIAKPSDRAIQPIHVGCDPGKSYSGIAVQSAQFTLYMAHLVLPFQRVKERLGAAVIKNGKVVKNVRGRALQRRVRRGRRINRKVPFRLRAHRQKRFNNRRQSKTPPSIWASRQMEIRVISELCKVFPVVSIVYEVVKADVDLTSGRKSAKSGKGFSPVMAAQYKAVDALSKLAPVVIRHGWQKDGNGTSQIRKQLGLIKDKQNKSNAKPETHAVDGIALAASQFVRYAPVDTGRDWIGDVTVTVAPFRVITRPAYFRRALHFDNPSKGNIRKRKGGTITPFGYRAGDKVQVTTKSQVLTGWVGGFTDTAKSKKVSVYDQHWKRLGQFGLKQIQLIRRSNKLCVV

SEQ ID NO: 510 - protein, 315 aa, Microcystis sp.
  VARIANT 267..300: note = Xaa can be any naturally occurring amino acid
MARVPVISKDGKPLMPTKPSRARRWIKEGKAIGKFNDLDIFYVQLIDEPSDSKTQPIAIGIDPGKLFSGIGVQSSLFTLWKAHLELPFKRVRERLDNRRLMRRGRRKRRINRQLSFNLRAHRQKRFSNRKQGKLAPSIRANRQLELRVVSELTKIYPITDIYFEYIKADIDLTSGRKGAKSGKGFSSVMVGQKWAIEQLSRLATVHTRFGWQTSNLRKYLRLEKSKNKAEQSPESHANDGIALACFQFLDYWPFHNSNSHGYDWKGXXXXXXXXXXXXXXXXXXXXXXXXXXXXXXXXXXDPLKIDKTPHPTPCP

SEQ ID NO: 511 - protein, 365 aa, Microcystis sp.
MARVPVISKDGKPLMPTKPSRARRWIKEGKAIGKFNDLGIFYVQLTDEPSDNKTQPIAIGIDPGKLFSGIGVQSSLFTLWKAHLELPFKRVKERMDNRRLMRRGRRKRRINRQLSFNLRAHRQKRFSNRRQGKLAPSIRANRQLELRVVSELTKIYPITDIYFEYIKADVDLTSGRKGAKSGKGFSPVMVGQKWAIEQLSQLATVHTRFGWQTSNLRKHLRLEKSKNKAEQSPESHANDGIALACFQFLDYLPFHTSNGHGYDWKGYVKVTNAPFAVIKRPPVSRRQLHLMVFSKGGKRRKYGGSTTRHGFRKGDLVSSPKGIGYVSGDTEKQLSVSDTSWKRLGQIAVSKIQLIRRSNGLIVSH

SEQ ID NO: 512 - protein, 344 aa, Scytonema sp.; identical to SEQ ID NO: 33

SEQ ID NO: 513 - protein, 355 aa, unidentified
  REGION 1..355: note = Candidatus Hydrothermarchaeota archaeon
MQNPRVPVVGKDGKPRMPTKASRARRWIKQGKATPKWNKLGIFYVQLTADVGEETQDVVLGLDPGSKFDGVAVVSKREVLQTGMLELPKGIAKKIKQRRQQRRFRRHRKCRRRPCRFNNRKRREGWIAPSQKAKVYFRLKIVEELKKLYPINKAVVEDVRFDHYYKRWGKHFSTVEIGKSKMYNTLRDWFGELKLVEGTETARLREKYNAKKSRDKRERSIDSHAIDALVIAADEIGLKKLKAPSFFVWKRYQYPRRQIHKFRFEKGGIRRREGGSMSLGFKKGDIVLWKGKLARVGGYLESKGTISLHTFDVDNKRFTQNAKPEDCIRLFNQRIMYTTIPLSSKDAELPCGRRL

SEQ ID NO: 514 - protein, 342 aa, unidentified
  REGION 1..342: note = Ga0373625_0000082
MLFVPVIGSGGKPLMPCHPARARELVRSGRAVRRFDRGLYYIRLTDRADGDVQPVAVGIDPGSKKEAFTVKSEAHTFLNVQADAVTWVTERMETRRDMRRARRGRNTPYRECRRNRGVKKGWLPPSTRARWGWKLRICNWLSRYYPISVFAVEDIKTRSRRGQRRWNKSFSPLEVGKGWFYEELRKLAMVETYGGHETKALRDAFGLRKTRDKMSNRFDAHCVDSWTLANAEVGGHSCPDHVGIMYMVPLKFHRRQLHRFQPRSGGMRAPYGGTMSLGLKRGTWVRHPMHGVAYVGGSANGRISLHGLRNGRRLCKDAKPDDCAALTRCSWRAYTEKKGEDA

SEQ ID NO: 515 - protein, 352 aa, Tolypothrix sp.; identical to SEQ ID NO: 491

SEQ ID NO: 516 - protein, 445 aa, unidentified
  REGION 1..445: note = Ga0315294_10001891
MLNCGEQNMAFDVMNPTLKGLGLSLTKDNASHDYHKLKGEKMQKTTTTQQLQSPEDASLVFSTDTESLNVKSLQTTVTNSESSKQLCPLGSEYNLNESSASMSGRIFVMGYEGKPLTPCKPNKARKLICGGAAKVVWNKFGEFGIQMLVSTREFTPKVVLGIDNGTKFEGYSLISGKENILNVMWLLPDKKKLVKKLDERRDLRRAKRWRNCRRRPERFDNRSREGFIAPSQLMMVQSRLKAINEFFKCYPINKVAIEDVKFNHRDKHYGKNFSTIEIGKNMIKAFIIGKVGRENYIPFEGFETEQVREKLGLKKSSKKSSETFNSHCIDSFSIASELSNAEPNFNIKVVDDTYRPTRRRLHDTQPKKGGIREKYSTGSFKGIRKGTICEFGQIVGGTGKQLKILPIERRKESEKRISKSIDKINWLSHKFKTKEVCNSPQALKA

SEQ ID NO: 517 - protein, 365 aa, Microcystis sp.
MARVPVISKDGKPLMPTKPSRARRWIKEGKAIGKFNDLDIFYVQLTDEPSDSKTQPIAIGIDPGKLFSGIGVQSSLFTLWKAHLELPFKRVKERMDNRRLMRRGRRKRRINRQLSFNLRAHRQKRFSNRRTGKLAPSIRANRQLELRVVSELTKIYPITDIYFEYIKADIDLTSGRKGAKSGKGFSSVMVGQKWAIEQLSQLATVHTRFGWQTSNLRKHLRLEKSKNKAEQSPESHANDGIALACFQFLDYWPFHASNSHGYDWKGSVKVTNAPFAVIKRPPISRRQLHLMVFSKGGKRRKYGGSTTRHGFRKGDLVSSPKGIGYVSGDTEKQLSVSDTSGQRLGQIAVSKIQLIRRSNGLIVSR

SEQ ID NO: 518 - protein, 373 aa, unidentified
  REGION 1..373: note = Ga0373625_0034772
MQELKEPDHAPQMVGNSGESLNPKSASSMHLHHGGCGCNREGSMSAHNVFVLGKDGIPLTPTKASKARKLMEGKVAKPVWNKFGQFGIQMLVNTRNETPNTALGIDNGTKFEGYSIVCDKENNLNAMWKLPDKKQIVRKLEERRILRRARRFRNCRRRECRFDNRNRDGFIAPSQLVMVNSRMKAIKEFFKTYPIKIVGIEDVRFRKHPKGNNYSTVEIGKSKIYEFLENHAILHKFAGWQTQKLRKLYGYRKSYVDKSAEKFSTHCCDSLALATALTAKKHIDNGKFIIVDDSYRPVRRRLHDTQFSKGHIRYPYSQGNFKGVRKGTISSHGLIGGGRYNGFRLYNWKGIRIFKTMKKVNWLSKKFFMKELI

SEQ ID NO: 519 - protein, 410 aa, Mastigocladus sp.; identical to SEQ ID NO: 479

SEQ ID NO: 520 - protein, 358 aa, Moorea sp.; identical to SEQ ID NO: 394

SEQ ID NO: 521 - protein, 369 aa, Planktothrix sp.; identical to SEQ ID NO: 147

SEQ ID NO: 522 - protein, 226 aa, Nostoc sp.; identical to SEQ ID NO: 271

SEQ ID NO: 523 - protein, 377 aa, Symploca sp.; identical to SEQ ID NO: 290

SEQ ID NO: 524 - protein, 367 aa, Microcystis sp.
MARVPVISKDGKSLMPTKPSRARRWIKEGKAIGKFNDLDIFYVQLIDEPSDSKTQPIAIAIGIDPGKLFSGIGVQSSLFTLWKAHLELPFKRVRERLDNRCLMRRGRRGRRINRQLSFNLRAHRQKRFSNRRTGKLAPSIRANRQLELRVVSELTKIYPITDIYFEYIKADIALTSGRKGAKSGKGFSSVMVGQKWAIEQLSQLATVHTRFGWQTSNLRKYLRLEKSKNKAEQSPESHANDGIALACFQFLDYWPFHNYNGHGYDWKGSVKVTNAPFAVIKRPPISRRQLHLMVFSKGGKRRKYGGSTTRHGFRKGDLVSSPKGIGYISGDTEKQLSVSDTNGQRLGQITVSKIQLIRRSNGLIVSR

SEQ ID NO: 525 - protein, 360 aa, Moorea sp.; identical to SEQ ID NO: 60

SEQ ID NO: 526 - protein, 381 aa, Trichocoleus sp.
MRIPVISHDNQPLMPTTPARARKWLASGKAIKRWSDLGLFYVQLTQEPSGRDTQPIAVGVDPGKLYSGIGVQSAQATLFLAHLILPFQTVKDRMEQRRMMRRGRRGRRINRKVAYSQRAHRQVRFDNRKQRKLPASVRANRQLELRVVTELCKLFPVSQIVYEYVEARGSKSFSPVMVGQRVMLDWLSKLAPVKTQLGYETAKLRTQLGLVKTKAKASQSPESHAVDGLALACSEFIQYESFHTANTHGHQWMGSVQITASLFRVIRRPPISKRQLHLMVPAKGGVRRRYGGTVTRHGFRKGDLVQAEMAGRVSIGWVSGDTQKHVSVSDCNWKRLGQFAASKVMLIARNTGVVASGASNPTQPPLLSLPASRGRGFSEEL

SEQ ID NO: 527 - protein, 369 aa, Planktothrix sp.; identical to SEQ ID NO: 147

SEQ ID NO: 528 - protein, 341 aa, Arthrospira sp.
MQSVPVVDINQRPLMPTTLNRAIRWNKSGKATLFYKKGVLCARLNVEPSSRFTQPLAVGMAPGSKREGFTVKSRTRTYLNIQAHAVDWVKNAVEAKRNARRARRYRNTPCRKNCPNRKRGGIPPSTKARWQWKLRICHWLTKLFPVTAFVVEDIKARTFKNCGQWNVLFSPMEVGKKWFYSELERIAILHTLKGHETAELRNQLGLKKSKQKLSDKFSAHCVDSWVLANWYTEGHEQPDNNELMVVIPLRFHRRQLHRFQPSKGGTRSPYGGTISEGFKRGGIAKHPKYGIVYIGGASKGSSESHTLETGKRLCQTRSPSRYQVLVIQFMEISICCKLVGG

SEQ ID NO: 529 - protein, 353 aa, unidentified
  REGION 1..353: note = Candidatus Poribacteria bacterium
MFVPVKSKSGKKLMPTHPNKAGMLIKKGLATPYWSNGIFCIRLNYETTDYTQDIVVGVDPGSKKEGLTVKSESRTYLNVQADAHDFVGNKRNKKGEITKLGKIGKRSQNRRSRRCRKCPNRKQKHHNLSHRNRIPAGTRARWDWKLRILEWLSKLYPVTHVCVEDIRARTIERARQWNESFSPLQVGKEWFYSEVRKRWQLLTLQGWETKEIRDRLGLKKSSKKLSETFDAHCVDSWCLAYHAVGGNGTPDNTDIFCIAPINTQRRCLHREQESKGGKRNRYGGTVLGNCLVKNTLIKHVKYGLTRLAGVNEKGLFSIYSLENKRLTTGAKRSDFSVLTRLNFYYRSGHSSQA

SEQ ID NO: 530 - protein, 343 aa, unidentified
  REGION 1..343: note = Candidatus Poribacteria bacterium
MNFVPVKSKDGERLMPTTPTRAGMMIKCGDATPYWDQGVFCIRLNREPSKRFKQEIVVGVDPGSKKEGFTVKSESHTYLNVQANAHSGVSKKVAKRRELRRSRRSRKCPNRKNRTNRLANEERIPAGTRARWDWKLRILDWLSKLYPVTYVCVEDIKARTIERAKKWNTSFSPLEVGKQWFYTEIRKRWELLTLQGWQTKEIRDRLGLKKSSEKMSETFDAHCVDAYCLAYHTVGGSGVPDNTDLLCVSPIPIKRRELHRQQEAKGGKRSRVGGTVLGPGLIKNTLIRHVKYGLTRLAGVNAKGVFSIYSMENKRLTTGAKRSDFRVLTRLNFYYRSGHSSQA

SEQ ID NO: 531 - protein, 374 aa, unidentified
  REGION 1..374: note = uncultured cyanobacterium
MRIPVVSIDNQPLMPTTPARARKWIEAGKAVKRWSDSGQFYVQLTVEPSGYATQDITIGIDPGKKYSGVGVQSAKFTLYTAHLILPFQAVKDRMEARRLMRRGRRGRRINRKIVFSKRAHRQKRFENRRQGKLAPSIRANRQLELRIVSELCKIYPVTEIRYEYVRADVDLISGRKKACSGKGFSPIMVGQKWMVNQLKQLAPVITIYGYQTANTRRYLGLNKNKADKSKTEFETHAVDGVAIAASHFVEYHQYHKVKVSGGNWFGSVAITFASFFVIRRPPYSRRQLHLMVPAKGGIRRKYGGSTTRHGVCLCLRHATLRKGDLVNSPKGIGYVSGDTEKQISVSDANWKRLGQIASSKVTLIRRSTGLIVAR

SEQ ID NO: 532 - protein, 411 aa, Trichormus sp.; identical to SEQ ID NO: 45

SEQ ID NO: 533 - protein, 338 aa, unidentified
  REGION 1..338: note = Ardenticatenales bacterium
MQYVPVVSSIGKPLMPCHAARARQLVRNGRAVRRFNKGIFYIQLLDRAEGDVQPIAVGVDPGSKREGFTVKSETHTYLNVQAEAVTWVSKHVAVRKTLRRRRRGRKTPYRKNRQNRARGGIPPGTQARWQLKLRVLRWLATLYPISIVVVEDVAAVTKAGKRRWNKSFSPLEVGKAWFYAEVEKLAELWTFKGYQTAEMRHAMGLTKSKHKLSTAWEAHCVDSFVLASIVIGGHIEPDNTEMLILVPLQLHRRALHRATPQKGGVRPPYGGTKSLGFKRGSWVKHPTWGVCYVGGTSKGRISLHALTTGKRLTQSAQPEDCRFLCHASWRVFHARQVG

SEQ ID NO: 534 - protein, 348 aa, unidentified; identical to SEQ ID NO: 190
  REGION 1..348: note = fermentation metagenome

SEQ ID NO: 535 - protein, 389 aa, Spirulina sp.; identical to SEQ ID NO: 186

SEQ ID NO: 536 - protein, 470 aa, Coleofasciculus sp.
MLRVPVLSKSGKPLMPTKPSRARRWLRDGKAKVVHNDLECFAIQLTFETQENTQPIAMGIDPGKCYSGIGVQSSLFTLWMGHLVLPFKTVKERMELRRVMRRARRGRRINRKLPYSKRCHRQARFDNRRQGKLPPSIRANKQLELRVVKELFKLFPISAIHYELVMADVDKTSGRKSARSGIGFSPVMVGQRQMLNWLSKLAPVVTHKGWQRDGNGTSQLRQWLGLAKDKKNKANQTPATHAVDGVTLAAFEFTRWQEWHSDNAKHGDWSGYVQITPAPFAVIRRPPISRRQLHLCVPSKGGKRRKYGGTVTRHGFSKGDKVIAEKAGKTYVGWCSGDTERQVSVSDANWKRLGQFTASKVQLLQRSTGLIVRRQAKSKCRAFNWIVKSPLIERVDLTSIPLHPASLRVESHAKYDEFFHETFTILLAHAGAFHPTKSTGVDRTFDGIVNPGFGVKLGLSTGLAIPCPQF

SEQ ID NO: 537 - protein, 355 aa, unidentified
  REGION 1..355: note = Candidatus Poribacteria bacterium
MNFVAVKSKEGKRLMPTTETRAAMMIKSGQATPYWDNGIFCIRLNYQSKEWTQEICVGVDPGSKKEGFTVKSESHTYLNVQADAHTHTAKKVKNRRELRRGRRSRKCPNRKNRTNRLANKERIPAGTRARWDWKLRILNWLDKLYPVTHICVEDIKASPWEGAKKWNQSFSPLEVGKNWFYGEVEKMWQLLTIQGYETKSIRDSLGLKKSSDKTAKSFETHCVDSWCLAYHVIGGEPTVDNTDIFCISPLQIKRRQLHRQLPQKGGKRPRFGGTMCLGVVKNTLVKHVKHGIAAVCGYQKGGLSLQPIQGGKRLILSAKLEDCKILTRLNFRYDLVSKQPKVEQNNLALQLTFDI

SEQ ID NO: 538 - protein, 401 aa, Arthrospira sp.; identical to SEQ ID NO: 7

SEQ ID NO: 539 - protein, 376 aa, unidentified
  REGION 1..376: note = Ga0373629_0094687
VKDVKDASLVFDLSGDQSRRDSTLKNPVRETSMVGKVTSQVCWIPVIAKTGKPLMPTRPKRARELMKNGKAIGRWKVGIFYLQLTEREDGNVQDIAVGIDPGSKREAFTVKSAKRTYLNVLSDAVTDVKDRVETRRTMRRNRRNRKTPCRQNRENRARGSLPPSTKARWQAKLRIIDIMLKLFPVKTWIIEDIKAKTWKGGKKWNSSFSPLECGKKWFYEEVRKKGELVLRSGWDTKQVRDRFGLVKTHGKMEEKFSAHNLDSWVLAHSVVGGNTKPDNEVIWRLVPLRFHRRQLHRLQPYMDGVRKREGGTMSCGLKRGSLVEHLKWGICYIGGFTKNVGLSLHRLDDGKRLCQNAKEKDLVVLRFNSWRYYRVA

SEQ ID NO: 540 - protein, 337 aa, unidentified
  REGION 1..337: note = Ga0315277_10158218
MFVPVVDKNRNPLMPTTPSRARRWIKCGKATPFWSDKVFCVRLNFDPSGTEKQDVVVGIDPGSKREAFTVKSESHTYLNVLADAVTWVKDVMEERRIARRSRRQRKTPCRLGRENRVRGGIPPSTRARWQLKLRIVNRLRRVFPITDFVVEDIKAVTKGGKRKWNASFSPLEVGKDWFYSELRKLGSLTIKQGYETFELRNTLGLKKTALKMSESFDAHNVDSWVLANFLVGGHVKPDNTEINRLIPIQFHRRQLQRFQPSKGGERKRYGGTMSLGFKKGSLVRNRKYGICYVGGHSENRLSLLDLETGKRLCRNARVENTRFLAYNSFRSGVVAKG

SEQ ID NO: 541 - protein, 375 aa, unidentified
  REGION 1..375: note = Gut metagenome
MVNIHNKNYNRIPVVYRGKPLMPTAWRRARRFIREGSARLKYTKLGIMFLEFLRRPSGFAFQKIAIGHDPGSKFDGISVVSKHSHLMNMELIHTKDIKKRMGKRSSCRRIRRSRLWHRKTRKDNRTSEKLPPTISSRLGFRKHALREICGLFPVSAFYAEDVRFNHFDSRWGKYFSLCEIGKSEIYRFATEELGLKLFRIRGFVTKEARKIVFGRDRKSHDKGKESFFAHCIDSFALGCLAFRIKDIHDCCLETIFVKRNWMSRRELFRLRAIRKDSREKTPYYFRYAKGGIKRIFKHVPKPRKIRLKPCDQASNHGPWTCEVAESEETFKSALVPYGGTISHGKSRSGAVCGVSKKWNAKGGNWKNNIYWRSYA

SEQ ID NO: 542 - protein, 305 aa, Richelia sp.
MNQTTRVPVISPDGKPLMPTTPARARKWIKSGKAIGKRNKVGVFYVQLLSVPSGYETQKIVVGTDRGKAFTGIAFQSKLATIVLFHACLPGFYKSKKTSKDRQSVTGKMEKRTELRRTRRGQRINRQVAFKLRNHREKRFNNRRQNKLPPSVKANREMELRILGEMSKILPITEIRDESCGGNSKKNGFGISPVTVGQEWFRLQASKIAFVVEVDSLDTGKHRDYLGLVKNKKDKSVQSPETHANDAIALASTYFVQYKEFHTTKTHGHRWIGECVVTPAPFVVVTRPKLFRRKLHQENYSRVEF

SEQ ID NO: 543 - protein, 368 aa, Coleofasciculus sp.
MIRVPVLSPDGEPLMPAKASRVRRWLKTGKARVVHNDLGIFQVQLVQPPLGKETQDVVAGIDPGKLFTGMAVQSRQATLFLAHLNLPFKNVTKRMTQRAMMRRGRRGRRINRKVTQDQRNHRQCRFDNRKGHKIPPSIRANKQLALRVVQELSKVYPFTDVVVEVIKAKGDKGFSPAMVGQFWQIEQLASAGYTVHTQEGWYTSDLRKYLGLPKSKNKAESSPAAHAVDGICLAASQFMRYRQIKGRSGTWLGGIEVTPCQFTVINRPPICRRQLHLMLPAKGKGRRKYGGTVTCHGLRKGDYVKAEKAGVTYYGYVSGDTKTQVSVSDANWKRLGQFTAKKVQLLQRNTGLVSTVGLSNLTTSSGKV

SEQ ID NO: 544 - protein, 361 aa, unidentified
  REGION 1..361: note = Cyanobacteria bacterium sp.
MRVPVISSDDQPLMPTKPSRARGWVREGKAKGFFKDLSQYCVQLLEEPTGTDTQSIAVGVDPGKKYSGLGVQSANYTLWKGHLILPFETVKKRMEQPRMMRRGRRGRRINRKLPYKQRAHRQKRFNHRRGHKLPASIRANRQLEYRVVKELTKVYPICAIYYEYVEAKGDKAFTPVIVGQKFMLQWLEQLAPTHTKLGWETASLRRDLKLEKSRNQGESTPASHAVDGIALASHSFRGMEKINGKNYRGQVWQGEVNLTESPFTVIRRPPVSRRQLHLMVEPLGGVRRKYGGTVTRHGFCKGDYVQASRKDQAFFGWVSGDTKSQVSVSNANWKRLGQFSTNKIRLLKHSTNLVTTAKAVI

SEQ ID NO: 545 - protein, 388 aa, Symploca sp.
MLMAVRSKLLSRQGLSPVQRVPVISPQGKALMPTKPSRARKWLRDGKAKIYKNDLNVFAIQLIAQPSGKETQNVVIGIDPGKMFSGVGVQSSKATLLKLHLILPFPNITKKMTGRRILRRARRGRRINRKLPYSQRCHRAKRFDNRVQKKLPPSIRVNRQLELRVVKEITRLFPISNIVYEYIKAPSNKGFSPAMVGQKVMLEWLRKIAPTSTIFGWETSNLRQWLELPKDKADKSKACEETHSNDGVALAASHFIKWKKWQSTKAHGGYWDGSVFVTSAPFKVIAKPSIYRRQLHFENPDSQKPNPTQYRKRKGGTVSPFGFRSGDFVQAEKAGQIYRGWIGGYTQTAKSKNVSIYDINWKRIGQFSLNKVRLLKRSTKLLVSGATS

SEQ ID NO: 546 - protein, 425 aa, unidentified
  REGION 1..425: note = Ga0315279_10012021
VVKINTMDPTHTKPVRAGIGRLKTTEPTARSRAQYVASSSQACDRYVGQSRREKLHVPSARAKHRLVPAPSVWVPVISSTGTPLMPCRSAYARALIKSGRAIRRWYRGIFCIKMLDRAEGIVQQVVVGVDPGSKREAMTVQSKQHTYLNVLSDAVTWVENQVEARKSMRKSRRFRKTPCRARRANRLCNSKRLPPSTKSRWQIKLNILKFIKKLYPISDIVVEDIKARTRKGSKKWNKSFNPLETGKTWFYYEVSKIGNLIKKQGYETFERRNFLGLKKTKNKLAETFDAHNVDSWVLASFVTGKSVVDNRELFRIIPLQLHRRQLHRYEPSKSGVRKLYGGTLSLGLKRGSVVNHTRLGLVYVGGTSNGKITLHDFTTGVRLTRRGLIEDCNFLYYNNWRVSISSSVTTPMVSDRKIYETPSTN

SEQ ID NO: 547 - protein, 379 aa, Crocosphaera sp.; identical to SEQ ID NO: 310

SEQ ID NO: 548 - protein, 365 aa, Microcystis sp.; identical to SEQ ID NO: 184

SEQ ID NO: 549 - protein, 351 aa, unidentified; identical to SEQ ID NO: 180
  REGION 1..351: note = Oscillatoriales cyanobacterium

SEQ ID NO: 550 - protein, 352 aa, unidentified
  REGION 1..352: note = Candidatus Chloroploca asiatica
MQYIPVLSATGERLMPCHAARARQLIRNGKAVKRFDRGICYLVLTKRETGETQPIALGIDPGSKKEAYTLQTEQHTILNIQADAVTWVKEHVETRRQMRRTRRYRKTPCRANRKNRARGGIPPSTRSRWGWKVRIARWLARYYPITAIVIEDIAAITLEGKRRWNASFSPLEVGKLWGYDQLDQIAPVQAVPSHYTKSLREQAGLKKSRDKTSDQWDAHCVDSFVLASYALGGPSKPTSINMLYLVPLRFHRRQLHRLQPEKGGVRKPYGGTRSLGLKRGSWVRHPKWGVAYVGGTYKGRISLHNMQTGKRLTQTVHVSDCQMLCTASWRIRAKAVSSRALLPALKRLGFRA

SEQ ID NO: 551 - protein, 394 aa, unidentified
  REGION 1..394: note = Ga0315296_10002743
MRDLVLSSASEPLNGTATVSSNLSLPCNVEGHKTPKGGRISPTLKVPVVGIDGKPLMPTTPQRARKLLKDGVAEKRWNKLGQFYIQMLRRVGIEKQPVCLAEDPGSKWDGVTVVSKESVLTCAMLVLPSKVAEKLEQRRRMRRARRYRNTPRRAKRFDNRRRPNGWIAPSQKAKVDFRIEIVDELCKIYPINQFAAEDVRFNHYMKRWGKHFSTVEIGKAEFYKHLKELGELTLYMGIETAELRKKFGLSKNPVKKELSWDTHAVDAIAIGCTELSCENPYPPEFWVWKRFEYARRQLHRLEPDKGGIRRRYGGSWSISPFRKGDVVQYQNGLARVGGFMDDLSLHRFSLANKRFTQTAKLGECKRLFNQQIFSKYENPQFLPPINGVGFLGGF

SEQ ID NO: 552 - protein, 365 aa, Microcystis sp.
MARVPVISKDGKPLMPTKPSRARRWIKEGKAIGKFNDLDIFYVQLTDEPSDNKTQPIAIGIDPGKLFSGIGVQSSLFTLWKAHLELPFKRVKERMENRCLMRRGRRGRRINRQLPFNLRAHRQKRFSNRRTGKLAPSIRANRQLELRVVSELTKIYPITDIYFEYIKADIDLTSGRKGAKSGKGFSSVMVGQKWAIEQLSQLATVHTRFGWQTSNLRKYLRLEKSKNKAEQSPESHANDGIALACFQFLDYWPFHNSNGHGYDWKGSVKVTNAPFAVIKRPPISRRQLHLMVFSKGGKRRKYGGSTTRHGFRKGDLVSSPKGIGYISGDTEKQLSVSDANGQRLGQIAVSKIQLIRHSNGLIVSH

SEQ ID NO: 553 - protein, 371 aa, Mastigocladopsis sp.; identical to SEQ ID NO: 138

SEQ ID NO: 554 - protein, 358 aa, Moorea sp.; identical to SEQ ID NO: 62

SEQ ID NO: 555 - protein, 380 aa, unidentified
  REGION 1..380: note = Ga0373628_0039306
MQGLKERQNAPQILNNSEESLNSTSESCKPLPHGGCGCNRKGRLSAHSVFVLGKDGTPLTPTKPARAKKMLNDKVAKPVWNKFGQFGIQMLVETRKETPKTAIAIDNGTKFEGYSVVCGNENNLNVMWKLPDKKKIVDKLTKRKLQRISRRKRNARRRACRFDNRNKKEFIAPSQLVIINSRLKVMKEILETYPIKLAGIEDVKFNHAKYRNGKNFTTMELGKNKIYEFLSKHAILHKFQGHQTQKLRKLYGYHKVRDKAKEDFRSHCSDSLAMATSLTTNRHIHAGKLIIVDDSYRPVRRRLHDTQPMKGNIRRPYSKGNFLSMRKGSMCNLGLLCGGTKNYAYIDNWIFHRSEKSIKNIKWMSKRFFIKEILNMGVRL

SEQ ID NO: 556 - protein, 354 aa, Acidithiobacillus sp.; identical to SEQ ID NO: 228

SEQ ID NO: 557 - protein, 323 aa, unidentified
  REGION 1..323: note = Candidatus Poribacteria bacterium
MPTSPPVARHLIKSGKATPYWSNGIFCIRLNYDTKAHTQEIVVGVDPGSKKEGFTVKSQSHTYLNVQADAHNKVSKKVAKRCELRRGRRSRKCPNRKNRMNRLANKERIPAGTRARWDWKLRILQWLSKLYPITHVCVEDIKAQTKQYQKKWNQSFSPLEVGKQWFYSEIRKRWELLTLQGWETKEIRDRLALKKSSKKLADTFEAHCVDSWCLAYHTVRGSEIPDNTDIFCIAPIPIRRRELYRQNPQKGGKRPRYGGTRCLQTVKNTLVRHVKYGLLRVSGHQNGKLTLSEISSSKQVVFQAKQEDYKILKRINFRYRPMV

SEQ ID NO: 558 - protein, 365 aa, Aphanothece sp.; identical to SEQ ID NO: 460

SEQ ID NO: 559 - protein, 348 aa, Methanomicrobiales sp.
MRVPVLDTHRRPLMPTTPKRARLLLKQGKARPYWNKLGIFCIILMYDVQPDNQQLVVGIDPGSSFEGWSVVGTKETALNGMSEAPKHVTNAVETRRTMRRARRHRKCWRRPARFNNRLSDRKFIPPSTFARWNAKIRIIEQLQKILPITDVVVEDVAAVSKKNCRRWNKNFSPLEVGKRWFYTAIRALGLDLYLRTGYETKELRDRFGLKKSSQKDKKTFSSHAVDAWVMAADISGAEHPPEIGLYYWTPIRVHRRQLHRFQPEKGGIRKPYGGTRSMGLTRGTLVHHIKYGLTYIGGTLKNRVSLHSYGTGKRVTQNARIEDCTIQTRIAWRTEWYAGTGRRHSSPA

SEQ ID NO: 560 - protein, 364 aa, Pleurocapsa sp.
MTTEKIRVPVLSPSGEPLMPTTSVRARKWIAAGKAKPVWNNLKIFCVQLLVEPSGTETQKIVVGIDPGKLFSGIAAVSSKAVLFTAHVLLPFKRVIARKQTQKILRRARRGRRINHNIPFVNRAHREKRFDNRRGSKLPPSIRANRQLELRIVKELAKLFPVAEIVYEYVKAKGNKGFSPVMVGQKWMLKQLPTIASTHRLEGWKTSNIRKHLGLAKNKDDKSIQDVSTHANDGISLAASRFIQYKPFRSVNSHGHHWVGSIQLSNAPFKVISRPQLYRRQLHFENKSKGGIRKRKGGTVTPFGFRSGDLVITTKGKKTVKGYIGGYSEVNKVVSIYNVSWKRLGQFSVSKTNLLRRSNGLCVA

SEQ ID NO: 561 - protein, 341 aa, unidentified
  REGION 1..341: note = Candidatus Poribacteria bacterium
MNFVPVKSKDGEKLMPTTPTRAGMMIKCGDATPYWDHGVFCIRLNREPSKRFKQEIVVGVDPGSKKEGFTVKSEAHTYLNIQADAHNGVGKKVEKRSRLRRGRRSRKCPNRKQRTNRMANKARIPAGTRARWDWKLRILHWLSKLYPLTHVCVEDIKARTQQYQKKWNTSFSPLEVGKQWFYAQIEKRWKLFTLQGWQTKEIRDRLGLKKSSKKLSEIFAAHCVDSWCLAHHTIGGVSVPDNTDLMCVSPIPIARRELHRQNPQKGGKRPRYGGTTQQGLVKNTLVKHIKYGLTRISGFGKRGISLYDLGGSRVCQNAKTSDFKVLRRLNFTYRNGFSSQV

SEQ ID NO: 562 - protein, 413 aa, unidentified
  REGION 1..413: note = Ga0315285_10002699
MSPNKTHTLPVRAGNGRLKTTEPTVRGRATDIRDASQVPLPSVGQSRREKLLVMPERARQSPRPSPVWVPVISSTGSPLMPCRPAYARALIKSGQAQKRWFRGIFSVKLLNRAEGKVQQVVVGIDPGSKREAMTVQSKQHTYLNVLSDAVTWVKDRVEVRKNMRRSRRFRKTPCRKNKANRGINCRRLPPSTKSRWQIKLNLLNFLKKLYPISDIVVEDIKAKTWKGAKKWNKSFSPLEVGKAWFYARVSLMGYLILKQGYETFERRNLLGLKKTKEKLAETFNAHNVDSWVLASYVTGKSSVDNKVMFRVIPLQLHRRQLHRFEPETGGFRKLYGGTRSMGLRRGSVVNHTKLGMVYVGGASKGKISLHDLGSGRRLTQSGSCKDVIFLNINPWRTQFLPRLKPWVSLRTGS

SEQ ID NO: 563 - protein, 303 aa, Chloroflexi sp.
VRVPVVDSRGVPLMPCTPAKARHLFKGGLARPKRNKLGLFYVQLCYQQQPDNQSLTVGIDPGSAFEGFSVVGTRDTVVNLMVEAPDHVKEAVEGRRTMRRTRRSRKWRRPKRFDNRLNRKKRIPPSTRSRWEAKARIVKQLCAILPINSAVVEDVQAVTRTGKHRKWNAAFSPVQVGKDHLYGLLCKMGLTLHLKEGWQTKALRETYGLKKTNRKSKQSFESHAVDAWVLAASHSGAKKPTCTRLWYIVPARLHRRQLHRLQASKGGIRKPYGGTRSLGLKRGTLVRHTKYGWCTVGGFDRKK

SEQ ID NO: 564 - protein, 365 aa, Microcystis sp.
MARVPVISKDGKPLMPTKPSRARRWIKEGKAIGKFNDLDIFYVQLTTESSNNKTQPIAIGIDPGKLFSGIGVQSSLFTLWKAHLELPFKRIRERMDTRRLMRRGRRGRRINRQLPFNLRAHRQERFSNRRQSKLAPSIRANRQLELRVVSELTKIYPITDIYFEYVKADVDLTSGRKGAKSGKGFSSVMVGQKWAIEQLSQLATVHTRFGWQTSNLRKHLRLEKSKNKAEQSPESHANDGIALACFQFLDYLPFHTSNGHGYDWKGSVKVTNAPFAVIKRPPISRRQLHLMVFSKGGKRRKYGGSTTRHGFRKGDLVSSPKGIGYISGDTEKQLSVSDANGQRLGQITVSKIQLIRRSNGLIVSH

SEQ ID NO: 565 - protein, 254 aa, Synechococcus sp.
IQADAVTWVKEHVEQRRQMRRTRRYRKTPCRQPRSNRARGGLPPSTKARWQWKLRLASWLIKLFPVTTFVVEDIQAKTKGQRRWDTSFSPLEVGKQWFYRQLSELGQVLTCSGWATKQMRDALGLKKTNKKTAEVFKAHCVDAWVLANSAVGGHRLPDNKRMLFLAPLRFHRRQLHRLQPDKKGRRTPYGGTLSLGLKRGSLVRHPKWGLAFVGGSSGNKLSLHRLEDGKRLTQNARKADVRHLSFCSWRFYGW

SEQ ID NO: 566 - protein, 338 aa, unidentified; identical to SEQ ID NO: 416
  REGION 1..338: note = Oscillatoriales cyanobacterium

SEQ ID NO: 567 - protein, 358 aa, unidentified
  REGION 1..358: note = coral metagenome
MLRVPVISPDGRPLMPTKASRARRWINKGLAVVYQNDLNVFAVQLVNKPSGEETQDIAVGVDPGKRFSGIAVQSNKTTLWTGHLVLPYKKVRVRMDTRRMMRRTRRSRRINRKVRYSQRSHRQKRFSNRREKKVPPSIRANRQLEQRVIKELSLLYPLRVIVYEVVKARGSKGFSPVMVGQYWSISQLERIAPVIQKQGWETALKREALGLVKDKADKSRLSVNTHAVDGIALAATHFFRRKNYYHSKGKLSVPRNCDVTDATFSVIKRPPISRRQLHLLQFYKGGKRRKYGGTTTSHGFRKGDYVEAVKAGKQARGWVSGETARQVSVSDINWKRIGQFTARKVRLLKRSTGLIINH

SEQ ID NO: 568 - protein, 421 aa, Anabaena sp.; identical to SEQ ID NO: 174

SEQ ID NO: 569 - protein, 364 aa, Anabaena sp.; identical to SEQ ID NO: 123

SEQ ID NO: 570 - protein, 382 aa, Geitlerinema sp.; identical to SEQ ID NO: 471

SEQ ID NO: 571 - protein, 365 aa, Planktothrix sp.; identical to SEQ ID NO: 112

SEQ ID NO: 572 - protein, 346 aa, Leptolyngbya sp.; identical to SEQ ID NO: 238

SEQ ID NO: 573 - protein, 339 aa, unidentified
  REGION 1..339: note = bioreactor sludge metagenome
MQKFVPVFDSNNRPLMPTKPQRADRWVKSGKATPFWKKGVWCIRLNIEPSSRHLQPICIGVDPGSKREAFTVKSQAHTYFNIQSHAVDWVKDAEEVSTNMRRARRFRKTPCRSPKKNYDRGEFLPPSTKARWQAKLRLIKFLAQLFPVSRIAVEDVKARTWKGARRWNTSFSPLEVGKLWFYSECRRLATLELFDGFEHTYQTRQELGLKKLKNKLSTDFHAHCVDSWVLAYLVAGGEPKPENQTVMEFIPLRFHRRQLHRLEHAKGHIRSPYGGTLSMGFKRGGIAKYPKYGTVYIGGSSKGRVSLHSLETGKRLCQNAKPEDIKFLSYNSWRFHHAS

SEQ ID NO: 574 - protein, 370 aa, Calothrix sp.
MLRVPVLSPSGNLLMPTKASRARRWLKEGKARVIYNDLGIFQIQLISCPKTQNTQAIAVGIDPGKLYAGIGVQSAKFTLWLAHLHLPFKTVKDRMEQRAMMRRGRRGRRINRSIAFSKRAHRQKRFDNRRQWKLPPSIRANRELELRIVDELSLIYPITTIAYEIVKARGGKGFSPVMVGQKWQLKNLAAYAKVKEVEGWQTANIRQQLGLCKQKHSKGDAIPATHAVDGVALACSTFIQYGMINRQTMGWSEKVQITPATFTIIRRPPVSRRQLHLMVPAKGGTRRKYGGTVTRHEFRKGDYVQATQGNKVYFGWVSGDTEKQVSVSDASWKRLGQFTAKKVQLVQRSTGLIVLPTRKMSSLMASNHQV

SEQ ID NO: 575 - protein, 344 aa, unidentified
  REGION 1..344: note = Oscillatoriales cyanobacterium
MFVPVLDSENRPLMPTTPSRARRWIKAGIATPFWKKGVFCVRLNVEPSNTHRQPIAVGIDPGSKREAFTVKSKAHAYLNVQTHAVDWVKDHIETRRNMRRARRFRKTPCRQNRANRLVNKHRLPPSTKARWQWKLRIAKWLTLMFPVSTFVVEDIKARKRKNARKWNVSFSPLEVGKRWFYRELTRIAHLEIKTGNDTYNLRQSLGLKKSKQKLSNKFEAHCVDSWVLANWYVGGHFEPDNTVLIEVMPLEFHRRQLHRLQHAPGHIRSRYGGTISAGFKRGSIVKHPKYGFCYVGGWQASPTKKDPNRKTISLHSLGTGKRLCQNALPGDCKFLSPNSWRIAN

SEQ ID NO: 576 - protein, 383 aa, Calothrix sp.
MNQNNQVTRVPVISPDGKPLMPTNPARARKWIKSGKAVGKRNKVGIFYVQLLREPSGHETQKIVAGTDRGKAFTGIAFQSKLATIALFHACLPGFYKSKKTIKDRQSVTGKMEKRTELRHTRRGQRINRNVAFKLRNHRAKRFSNRRQSKLPPSIKANREMELRILTEMSKIIPFSEIRDESCGGNSKRNGFGISPVTVGQEWFRKEASRLAPIKEIDSLDTGKYRTQLGLIKDKKDKSKQTPETHANDAIALASTAFIQYKEFHTAKSHGHHWVGECAVTTSPFIVITRPKLFRRKLYQENYSKGGVLKRQGGTITPFGFRSGDYVRTSRKGELIHGWVGGFTNSGKTKNISIYDHNWSRIGQFNPNNVKLIKRSSRLCVVA

SEQ ID NO: 577 - protein, 418 aa, Aliterella sp.; identical to SEQ ID NO: 441

SEQ ID NO: 578 - protein, 172 aa, unidentified; identical to SEQ ID NO: 136
  REGION 1..172: note = Oscillatoriales cyanobacterium

SEQ ID NO: 579 - protein, 365 aa, Microcystis sp.
MARVPVISKDGNPLMPTKPSRARRWIKEGKAIGKFNDLGIFYVQLTTESSNNKTQPIAIGIDQGKLFSGIGVQSSLFTLWKAHLELPFKRVKERMDNRRLMRKGRRGRRINRQLSFNLRAHRQKRFSNRKQGKLAPSIRANRQLELRVVSELTKIYPITDIYFEYIKADIDLTSSRKGAKSGKGFSSVMVGQKWAIEQLSQLATVHTRFGWQTSNLRKYLRLEKSKNKAEQSPESHANDGIALACFQFLDYWPFHNSNGHGYDWKGYVKVTNAPFAVIKRPPISRRQLHLMVFSKGGKRRKYGGSTTRHGFRKGDLVSSPKGIGYVSGDTEKQLSVSDTSWKRLGQITVSKIQLIRRSNGLIVSH

SEQ ID NO: 580 - protein, 351 aa, unidentified
  REGION 1..351: note = viral metagenome
MDQQSGNSVFVPVMDQDGKTPLMPTTPSRARRWVKSGEATPFFKKGVFCVRLNRAPSGQERQVIVATVDPGSKREGFTVKSKAHTYLNVHADAVPWVKDAVETRKNMRRGRRFRKTPCRKPGPSDAMMRAGKRIPPSTKARWGWKLRVFNWLCALFPVTDVGVEDIQATTRKGKRKWNRSFSPLQVGKEWFYEEIRRMDVTLHLRAGFETKALRDRLGLKKTSRKLAETFAAHCVDSWAIAWDIVGGSETPDNRDLLCIQPIRLHRRQLHRFQPSKGGERLSYGSTRSHGFKRGSLVRHAKWGLAYVGGVLKDRISLHHIGSGKRLTQNAKPADCRFLTYNVWKFHGVAHT

SEQ ID NO: 581 - protein, 407 aa, Acaryochloris sp.; identical to SEQ ID NO: 307

SEQ ID NO: 582 - protein, 347 aa, unidentified; identical to SEQ ID NO: 410
  REGION 1..347: note = Cyanobacteria bacterium UBA11370

SEQ ID NO: 583 - protein, 365 aa, unidentified; identical to SEQ ID NO: 388
  REGION 1..365: note = freshwater metagenome

SEQ ID NO: 584 - protein, 343 aa, Microcoleus sp.
MFVPVVSSENRLLMPTTPSRAKRWIESGKATPFWRKGVFCVRLNREPSNYNYQPIAVGIDPGSKREGFTVKSKSHTYLNIQTHAVDWVKDHVEVRRNMRRSRRFRKTPCRQNRKNRLVNKTRIPPSTKARWQWKLRIVNWLTSMFPVSAFVVEDIKARTWKNGRKWNVSFSPLEVGKQWFYSELRKLAKLEIRLGNDTYNLRQNLGLKKSKQKLSNKFEAHCVDSWVLANWYAGGHLQPDNTKLIEVIPLEFHRRQLHRLQHSIGHVRSRYGGTLSAGLKRGSLVKHPKYGFCYVGGWQESPTKKDPGRKTVSLHSLNTGKRLTQNALPADCKFLSYNSWRVA

SEQ ID NO: 585 - protein, 306 aa, unidentified
  REGION 1..306: note = Candidatus Poribacteria bacterium
MFVPVKTKDGQQLMPMHASRARKLVKRGEATPYWNNGIYCIRLNKEPSDRETQDICVGVDPGSKKEGFTVKSKADTYLNIQADAHTHTSKKVAKRRELRRGRRSRKCPNRKQKKHNLSHRHRIPAGTRARWDWKMRILDWLSRLYPITHVCVEDIKARTKQYQKKWNQSFSPLEVGKQWFYSEIEKRWQLSRLVGHETKNVRENLGLKKSSDKTAESFDAHCVDSWCLAYHVLGGDPIVDNTDIFCISPIPIQRRNLHREVPKKGGIRSRYGGTRCLGFTKGTLVKSMKWGLCWISGHQNGKINLT

SEQ ID NO: 586 - protein, 364 aa, Mastigocladopsis sp.; identical to SEQ ID NO: 165

SEQ ID NO: 587 - protein, 374 aa, unidentified
  REGION 1..374: note = metagenome
MESNRCPVRYKKLILMPTTWRKAKRLVKIKKGVFVKDKVLGTYLKLKYNPIRDGEIPSENQEMVLGIDPGSMFDGFTVISKLDNRNFQFNHQLAISKSLKSIMNKRIGYRRLRRYRLRFRPMRIESRNGCKISNTSNYYFQNRVNMIKRIISFYPIKSISIEDVRFNHYISNKGKSFSNIEVGKSRLYNYITNNLKLNLYKVKGKDTKEMRELLFPDRVKNKDKSVRDFDSHCIDSYTIGILGYLEVTKDYRPISLIPINKKYNSSVRFIDRLSYKYRRELHRLKNKIRDSRFYFRYRKGGVRINIDHKSKLKKIRLKINDTKSNHGKIWNYIYINPDSTYKKFITNYGGTIGKDGVSKYWNGKYYKYYEIEII

SEQ ID NO: 588 - protein, 369 aa, Symploca sp.
MQRVPVISPQGHPLMPTKPSRARRWLSEGKAYIYANDLNIFAVQLITQPSGEETQDVVVGIDPGKYFSGVGVQSCNATLLKLHLILPFPNVTKKMTARRILRRTRRGRRINRKLPYEQRCHRAKRFDNRVQKKLPPSTRANRQLELRVVKEVCQLFPVSHIVYEHIKARGDKGFSPVMVGQKVMLKWLEEIAPTSTLLGWETSNLRQWLKLPKDKTDKSKACEETHANDGVTLATSHFIKWKEWKDVRRNVRGGCWTGKATITSAPFKVIAKPNIYRRQLHFENPDSKKPNLTQYRKRKGGTITPFGVRSGDFVGAEKAGQIYRGWIGGYTQTAKSKKVSVYDVNWKRIGQFAPKKVKLLKRSCKLCVN

SEQ ID NO: 589 - protein, 365 aa, Microcystis sp.; identical to SEQ ID NO: 517

SEQ ID NO: 590 - protein, 419 aa, unidentified; identical to SEQ ID NO: 272
  REGION 1..419: note = Ga0315277_10009605

SEQ ID NO: 591 - protein, 351 aa, unidentified; identical to SEQ ID NO: 180
  REGION 1..351: note = Oscillatoriales cyanobacterium

SEQ ID NO: 592 - protein, 351 aa, Methanocalculus sp.
MRIPVLDINKTPLMPTTPARARLLLKQGKARPYWNKLGIFCIILTYQVNPDNQFLVIGIDPGSSFEGWSIVGTQETVLNGMSETPKHVKKAVETRRTMRRSRRYRNCWRRPARFKNRLKNRSSIPPSTFARWNAKLRILTQIQKIIPLTDVVVEDIAAVTKKNCKRWNSNFSPLEVGKQWFYRTIRSLNFDLHLRTGYETKDLRDRFNLRKTSQKNKPVFSSHAVDAWVMAADVSGAKQPTEHGLFYWTPIRFHRRQLHRLQPETGGIRKPYGGTISLNLIRGTLVNHFKHGLSYIGGTLKERLSLHHFRTGKRLTQSAKPTDCTILTRIAWRTTHYADTRQSAFLSRLKS

SEQ ID NO: 593 - protein, 330 aa, unidentified
  REGION 1..330: note = Cyanobacteria bacterium sp.
  VARIANT 269..319: note = Xaa can be any naturally occurring amino acid
MRVPVISSDEQPLMPTKPSRARGWVREGKAKGFFKDLSQYCVQLLEEPTGTDTQSIAVGVDPGKKYSGLGVQSANYTLWKGHLILPFETVKKRMEQPRMMRRGRRGRRINRKLPYKQRAHRQKRFNHRRGHKLPASIRANRQLEYRVVKELTKVYPICAIYYEDVEAKGDKAFTPVMVGEKFMLQWLEQLAPTHTKLGWETASLRRDLKLEKSRNQGESTPASHAVDGIALASHSFRGMEKINGKNYRGQVWQGEVNLTESPFTVLRRXXXXXXXXXXXXXXXXXXXXXXXXXXXXXXXXXXXXXXXXXXXXXXXXXXXPIAARKTCHAA

SEQ ID NO: 594 - protein, 365 aa, Microcystis sp.
MARVPVISKDGKPLMPTKPSRARRWIKEGKAIGKFNDLGIFYVQLTTEPSNNKTQPIAIGIDQGKLFSGIGVQSSLFTLWKAHLELPFKRVRERMDNRRLMRKGRRGRRINRQLPFNLRAHRQKRFSNRKQKKLAPSIRANRQLELRVVSELTKIYPITDIYFEYIKADIDLTSGRKGAKSGKGFSPVMVGQKWAIEQLSQLATVHTRFGWQTSNLRKHLRLEKSKNKAEQSPESHANDGIALACFQFLDYLPFHTSNGHGYDWKGSVKVTNAPFAVIKRPPISRRQLHLMVFSKGGKRRKYGGSTTRHGFRKGDLVSSPKGIGYVSGDTEKQLSVSDTNGQRLGQIAISKIQLIRRSNGLIVSH

SEQ ID NO: 595 - protein, 363 aa, Mastigocladus sp.
MLRVPVLTPSGKPLMPTKASRARRWLKEGKARVVYNDVGIFQIQLVRCPRTQDIQPIAVGIDPGKLYTGIGVQSAKFTLWLAHLQLPFKTVRERMEQRAMMRRGRRGRRINRKLPYNQRAHRQKRFDNRRQCKIPPSIRANRELELRVLDELSLIYPITTVAYEIVKASGDKGFSPVIVGQKWQLENLATYAEVKQVEGWQTANIRQQLGLHKQKHSKGDAIPATHAVDGVAASCSAFVRYGIIDRHSRGWKGDVTVTPAPFTVIRRPPVSRRQLHLMLPSIGGVRRKYGGTVTRHDFRKGDLVKVPSGEIGYCSGDTEKALSVSDADWRRLGRFSPKKSQLVQRSTGLIVLPTKRLSNLLVS

SEQ ID NO: 596 - protein, 365 aa, Microcystis sp.; identical to SEQ ID NO: 274

SEQ ID NO: 597 - protein, 344 aa, unidentified; identical to SEQ ID NO: 474
  REGION 1..344: note = Oscillatoriales cyanobacterium

SEQ ID NO: 598 - protein, 339 aa, unidentified
  REGION 1..339: note = Ga0373627_0079985
MYVPVVDREQRPLMPTTSSRAASWIKSGKATPFWKKGVFCVRLNVEPSERKMQDVAVGVDPGSKKEAFTVKSETHTYLNIQADAVTWVKDAVKTRREMRTNRRNRKTPCRQCRSNRNINTIFLPPSTKARWQWKLRILNWLRKMYPIVCVVVEDIKAFTWKGKRCWNVSFSPLEVGKEWFYQRVKEFAHLETKLGFETKEFRDSLGLKKSSSKMSKKFNAHCVDSWVLANWWTGGHIQPDNTRMLLISPLRFHRRQLHRLQPEHGGVRKPYGGTHSLGFKRGSLVKHSKYGLAYIGGYSKDRISLHSLVDGKRLCQNAKPQDCKFLAYNERRWGVSSTG

SEQ ID NO: 599 - protein, 316 aa, Mastigocladus sp.
MLRVPVLTPSGKPLMPTKASRARRWLKEGKARVVYNDVGIFQIQLVRCPRTQDIQPIAVGIDPGKLYTGIGVQSAKFTLWLAHLQLPFKTVRERMEQRAMMRRGRRGRRINRKLPYNQRAHRQKRFDNRRQCKIPPSIRANRELELRVLDELSLIYPITTVAYEIVKASGDKGFSPVIVGQKWQLENLATYAEVKQVEGWQTANIRQQLGLHKQKHSKGDAIPATHAVDGVAASCSAFVRYGIIDRHSRGWKGDVTVTPAPFTVIRRPPVSRRQLHLMLPSIGGVRRKYGGTVTRHDFRKGDLVKVPSGEIGYCSG

SEQ ID NO: 600 - protein, 358 aa, Moorea sp.
MLRVPVISPDGKPLMPTKASRARRWLNQGLAVIYQNDLNVFAVQLVNQPSGEQTQDIAIGIDPGKMFSGIAVQSNNATLWTGHLVLPYKKVRVRMDTRQMMRRTRRSRRINRKVPYSQRSHRQKRFSNRVSKKVPPSIRANRQLEQRVAKELSLLYPVKAIVYEIVKARGNKGFSPVMVGQSWSISQLEKIAPVTQKQGWETALKREALGLVKDKTDKSRQSVNTHAVDGIALAATHFFRRKNYYHSKGKLSVPENCNITNTLIFVIRRAPISRRQLHLLQFSKGGKRRKYGGTTTSHGFRKGDYVEAVKAGKVTRGWVSGETARQVSVSDIDWKRIGQFTARKVRLLKRSTGLIVNY

SEQ ID NO: 601 - protein, 384 aa, Geitlerinema sp.; identical to SEQ ID NO: 196

SEQ ID NO: 602 - protein, 337 aa, Arthrospira sp.; identical to SEQ ID NO: 85

SEQ ID NO: 603 - protein, 367 aa, Limnoraphis sp.
MFNKRVPVLNPDGSPVMPTKASRARRWVRDGKAKVVQNDLQVFCVQLLEEPTGRETQDISLGIDPGSCFTGVAVQSKRDTLIGLNLNLPKKRVQKRLEERRVLRRTRRGRRIKRSLLFKKRNHRQKRFDNRRQSKLPPSIRANKQLELRVVDELRQLYPIAHAYIERLNKSDSPGFTVAAQGQTFLIKELGKYFPVALVKGWETSGTREWLKLPKSKNKAEQTPNAHVSDAIALASRHFIRYTPNTTGFQTGYQWKGVIQVTPFTFGIVERLPSRPRKMHDLTVQKGGVRDTYGGFDGTHSFKNGDYVEYKTKRSTLKGYISANDLYQFFPKKKRLKQGVSDKNTCLLRYSSHLVVNLHKGLAFLSR

SEQ ID NO: 604 - protein, 365 aa, Microcystis sp.
MARVPVISKDGKPLMPTKPSRARRWIKEGKAIGKFNDLDIFYVQLTTESSNNKTQPIAIGIDPGKLFSGIGVQSSLFTLWKAHLELPFKRVRERIDNRRLMRRGRRGRRINRQLPFNLRAHRQKRFLNRRQGKLAPSIRANRQLELRVVSELTKIYPITDIYFEYVKADVDLTSGRKGAKSGKGFSPVMVGQKWAIEQLSQLATVHTRFGWQTSNLRKYLRLEKSKNKAEQSPESHANDGIALACFQFLDYWPFHNYNGHGYDWKGSVKVTNAPFAVIKRPPVSRRQLHLMVFSKGGKRRKYGGSTTRHGFRKGDLVSSPKGIGYVSGDTEKQLSVSDTNGQRLGQIAVSKIQLIRRSNGLIVSH

SEQ ID NO: 605 - protein, 364 aa, Planktothrix sp.
MRIPVIDQNNKPLMPTTPARARKWIESGKAVKHWSDGGQFYVQLTVEPSGYTTQNIVIGIDPGKKFSGIGVQSAKFTLYTAHLILPFQTVRERMDIRRLMRRSRRGRRINRKVEFSKRNHRQKRFNNRRQGKLAPSIRANRQLELRIVSELCKIYPVAEIRYEYIKADVDLTSGRKQAKSGKGFSPVMVGQKWMLSQLEKLAPVVKIEGYQTASTRKYLGLTKNKVDKSKAKFNTHAVDGVAIAATAFVEYRPYHTAKTDGANWFGDVVITTTQFRVIRRPPFSRRQLHLMLPAKGGVRRKYGGSTTRHGFRKGDLVKCPKGVGYVSGDTERQVSVSDANWKRLGQIASSKVQLIRRSNGLIVT

SEQ ID NO: 606 - protein, 402 aa, Tolypothrix sp.
MIRVSVLDKDGKPLMPTKPSRARRWLKEGKAKILHNDLNIFCIQLLVKPSGYNQQSIALGLDPGKKFTRVGVQSTKFTLFMAHLILPFPDVTKKMSGRLILRCARRGRRINRKVAFNKRAHRQKRFDNRKQNKLPPSIRANKELELRVTKELIKLFPVTQITYEYIKAKGDKGFSPVMVGQKVMLQWLAEIAPTNTQEGWQTSILRQQLGLAKDKKNKEKQTPETHAHDGIALAASNFMRFEKFHTANARGHHWLGEVTVTSASFRVIARLRVFRRQLHFENPVKDVPGNRKRKGGTVTPFGLRSGDLVKAEKAGKVYIGWIGGYTQTAKTKNVSVYDHNWHRLGQFSPSKVLLIKRSTRLCVAPKFPRNSSRHRIKDYGVGLLAERVEKLSFALSARFRSS

SEQ ID NO: 607 - protein, 344 aa, unidentified; identical to SEQ ID NO: 575
  REGION 1..344: note = Oscillatoriales cyanobacterium

SEQ ID NO: 608 - protein, 398 aa, Microcoleus sp.
MIRVPVLSPKGKPLMPAKASRVRRWLKSGKVKVIRNDLGVFQVQLVKEPSGEQTQDIAAGIDPGKLFTGMAVQSKSVTLFLAHLNLPFKTVTKRMQGRAMMRRGRRGRRINRKVPYDQRNHRECRFDNRKGHKIPPSIRANKQLALRVIQELSKIYPFTHVLVEVIKARGDKGFSPAMVGQYWQIEQLEQAGYTVHTQEGWHTSNLRKYLGLPKSKNKAEESPAAHAVDGICLAASRFIRYRQIKGRSGTFLGSITVTPCQFAVISRSPICRRQLHLMIPGKGGKRRHYGGTLTRHGLRKGDYVKAEKAGITYYGYVSGDTKTQVSVSDAKWKRIGRFTTKKVQLLQRNTGLVSTVGLSNLALSEVEGRGLTSIPLRPTSLRSESHEVKRWIVSPINL

SEQ ID NO: 609 - protein, 349 aa, Thermodesulfitimonas sp.
MVTRVPVVGVDGRPLMPTTPRKARLMIRDGIAVPRRNKLGLFYVQMLRPVGTKTQPVALAVDPGAKYDGVAVASHRRVELKAMVFLPDDVPKKMDARRNLRRARRYRNTPRRPKRFDNRRRKGYWLAPTQRSKVETRLKVVRELCKIYPIRLIVTEDVRFNHARDRNGKYFSTVEIGKTLTYREYRKLAELKLVEVSETDAWRARFGLEKRTDRKWEQVPETHANDAVAMLMGVTGCHDNRDAPFWVWHRLRYARRSLHRQHFQKGGIRPKFGGTTNGGLFRKGDWVEAEKAGKVYRGWVCGLPTETTKLVGVADADGRRIGQFSMRKIRLLARSTGFSWREVKPAFLP

SEQ ID NO: 610 - protein, 412 aa, Pleurocapsa sp.
MTNTLDSRSTWAKKARFGRGGGWGNPSISNHGVGSEDSVPKSRRPKTALSRKIRVPVLSPLGEALMPTTSVRARKWIASKKAKPVWNDLNIFCVQLLVEPSGTETQEIVASIDPGKMFSGIAAVSKKAVLFAAHVVLPFKRVIARKQAQKILRRARRGRRINRNIPFAQRAHRQKRFNNRRNHKLPPSIRANRQLELRIIQELTKLFPVTEIVYEYVKARGNKGFSPVMVGQKWMLKQLSDIAPTHTLEGWQTSILRKHLGLKKNKNDKSIQDVTTHGNDAIALGASRFVQYKAFHTSNSRGHHWVGSIQLTDAPFKVIARPQLYRRQLHFENPQKGGIRKRKGGTVAPFGFRSGDLVQATKGKNTVKGYIGGYSEKNKVVSLYEGVTWKRLGQFSVSKAKLLKRSTGLCIT

SEQ ID NO: 611 - protein, 379 aa, Crocosphaera sp.; identical to SEQ ID NO: 255

SEQ ID NO: 612 - protein, 361 aa, unidentified
  REGION 1..361: note = Cyanobacteria bacterium sp.
MRVPVISSDEQPLMPTKPSRARGWVREGKAKGFFKDLSQYCVQLLEEPTGTDTQSIAVGVDPGKKYSGLGVQSANYTLWKGHLILPFETVKKRMEQPRMMRRGRRGRRINRKLPYKQRAHRQKRFNHRRGHKLPASIRANRQLEYRVVKELTKVYPICAIYYEDVEAKGDKAFTPVMVGEKFMLQWLEQLAPTHTKLGWETASLRRDLKLEKSRNQGESTPASHAVDGIALASHSFRGMEKINGKNYRGQVWQGEVNLTESPFTVLRRPPVSRRQLHLMVEPLGGVRRKYGGTVTGHGCCKGDYVQASRKDQAFFGWVSGDTKSQVSVSNANWKRLGQFSTNKIRLLKHSTNLVTTAKAVI

SEQ ID NO: 613 - protein, 379 aa, Crocosphaera sp.
MLRVPVLSPDGTPLMPTKASRVRRWISDGKAVGKFNDLGQFYVQLLVKSSDTKTQSVSVGIDPGKHFSGIGVQSSKYTLFTAHLELPFKKVRERMNNRRMMRRGRRGRRINRKLPFHLRAHRQKLFSNRKQGKLPPSIKANRQLELRVIQQLCKVFPITDIYFEYVKADVDLTSGRKGAKSGKGFSAVMVGQKWMLKQLEKLGNVHTIYGWQTSNLRKHLRLDKSKNKSKQTASSHAVDGVTLACYQFLEYKAHCSGNNHGHIWQGNVTITACQFMVIKRPPISRRQLHLMLPIKGGKRRKYGGTVTRHNIRKGDFVKAIKAGKVFYGWCSGDTAKQVSVSNFDWKRLGQFTASKVVLLQRSTGLICKQEADFVGATVC

SEQ ID NO: 614 - protein, 368 aa, Richelia sp.
LPEGTGFIPRYKLVIIWVIPMNQTTRVPVISPDGKPLMPTTPARARKWIKSGKAIGKRNKVGVFYVQLLSVPSGYETQKIVVGTDRGKAFTGIAFQSKLATIVLFHACLPGFYKSKKTSKDRQSVTGKMEKRTELRRTRRGQRINRQVAFKLRNHREKRFNNRRQNKLPPSVKANREMELRILGEMSKILPITEIRDESCGGNSKKNGFGISPVTVGQEWFRLQASKIAFVVEVDSLDTGKHRDYLGLVKNKKDKSVQSPETHANDAIALASTYFVQYKEFHTTKTHGHRWIGECVVTPAPFVVVTRPKLFRRKLHQENYSKGGILKRQGGTVTPFGFRSGDYVQTSKKGEIIRGWIGGFTNSGKTKN

SEQ ID NO: 615 - protein, 389 aa, unidentified
  REGION 1..389: note = uncultured cyanobacterium
MNTKTDQSTRVPVVDPEGKPLMPTTPARARKWILKGRAVPKRNKLGVFYVQLTVKPSGYNTQPIVAGVDRGKCFTGIAFQTKLVTIALFHACLPGFYKSKNLGKKNETLDRQSVTGKMAKRSELRRTRRGQRIVCKKPFKLRNHREKRFSNRRRKKLPPSVLSNRQMELRILNEMALILPISEIRDEACGGDTKKNGKGISPVTVGQEWFRAEVSKIAPVVEMDSWDTGKYRDRLGLIKDRNNKSRQTPETHANDAIALAASYFIQYKPFHTANTHGHEWVGNCIVTSAPFIVLTRPKLFRRKIYQENYSKGGVLKRQGGTTTPFGFRSGDYVEATFKGDKVRGWIGGFTNTGKTKNVSIYDHNWSRVGQFNPKNVRLLQRSSRLCITR

SEQ ID NO: 616 - protein, 409 aa, Geitlerinema sp.; identical to SEQ ID NO: 419

SEQ ID NO: 617 - protein, 339 aa, unidentified
  REGION 1..339: note = Ga0315284_10104187
MFRVPVITGDRKALMPTHQANARVLIKSARTTPFFHKGIFCIRLNKWLSENIQPISIGIDPGSKKEAFTVMCEHHTLLNIQLDAVTHVKDAVEAKRNARRARRYRNTPCRKPRYKQCRRKGWVPPSTKARWDNKINPIIALKKVYPISVVVAEDVSARTMKNGKRWNKSFSPVQCGKHYFVESIKSLNLNLTLKEGWETAALRAINSLPKSKNKMDNTWEAHCVDSWVLASVPLAQTPIVNKAMIVAKPLRFHRRQLHVFQPAKGGIRKSYGSTRSFGLRRGSIVTHPKFGKCIVGGSSKGRISLHSISDNKRLTQNSKIEDIKFLCYNNWNFNFNPTR

SEQ ID NO: 618 - protein, 360 aa, Moorea sp.; identical to SEQ ID NO: 60

SEQ ID NO: 619 - protein, 360 aa, Moorea sp.
MLRVPVISPNGQPLMPTKASRARRWVKEGKAIIYPNALDIFAIQLVAEPSGEETQSIAVGIDPGKMFTGLAVQSAQATLWTGHLVLPYPKVRDRIDTRGMMRRTRRSRRINHKIPYDQRAHRQKRFENRLAKKLPPSIKANRDLEFRVVSELFELYPISQIVYEVVKAKGTKAFSPVMVGQYQSIQRLEATFTVPVTQKMGSETSMARKGLGLTKDKTDKSRQTAETHANDGIALASFPFRKVKTQYYRNGKVVTPTVAVVTLAPFAVVSRPPISRRQLHLLQFSKGGKRRKYGGTTTRHGFRKGDYVEAVKAGQTYRGWISGDTATQVSVSNSNWKRIGQFSARKVRLLKRSTGLLVNY

SEQ ID NO: 620 - protein, 349 aa, Richelia sp.
  VARIANT 349: note = Xaa can be any naturally occurring amino acid
MNQTTRVPVISPDGKPLMPTTPARARKWIKSGKAIGKRNKVGVFYVQLLSVPSGYETQKIVVGTDRGKAFTGIAFQSKLATIVLFHACLPGFYKSKKTSKDRQSVTGKMEKRTELRRTRRGQRINRQVAFKLRNHREKRFNNRRQNKLPPSVKANREMELRILGEMSKILPITEIRDESCGGNSKKNGFGISPVTVGQEWFRLQASKIAFVVEVDSLDTGKHRDYLGLVKNKKDKSVQSPETHANDAIALASTYFVQYKEFHTTKTHGHRWIGECVVTPAPFVVVTRPKLFRRKLHQENYSKGGILKRQGGTVTPFGFRSGDYVQTSKKGEIIRGWIGGFTNSGKTKNX

SEQ ID NO: 621 - protein, 364 aa, Planktothrix sp.; identical to SEQ ID NO: 605

SEQ ID NO: 622 - protein, 360 aa, Lyngbya sp.; identical to SEQ ID NO: 60

SEQ ID NO: 623 - protein, 347 aa, Chloroflexi sp.
MSQQFVPVVGSTGKPLMPTTHKRANKLIAKGRAVRRFDRGLFYIKLLDREEGYTQPIAVGIDPGSKKEALTVKSASHTYLNIQADAVTWVKEVEQTSTQMRRSRRNRKTRYRACRPNRRQGQFQLPSSTRARWGWKLRLCRWLARYYPIQVFVVENIKATTKQGQRRWNSSFSPLEVGKQWFYAELGQIAEVQTVQGYETKQLRDKLGLKKSKNKMSDQFEAHCVDSWVLANSAVGGHTDVDNPAILCIIPLRFHRRQLHALQFAKGGERRPYGGTLSMGIKRGTWIKHPKYGLCYVGGSNKSRISLHDMDSGQRVCQKAKPEDCIILTTASWRIKSERSKALPPHA

SEQ ID NO: 624 - protein, 365 aa, Microcystis sp.; identical to SEQ ID NO: 226

SEQ ID NO: 625 - protein, 377 aa, Synechococcus sp.
MNSRVPVVDNNDKPLMPTKASRARRMVRDGKAIGQWSDLGVWYIKLVAEPSGDATQPIVAGVDPGKSYSGVGVQSGKHTLFRGHLVLPFNRVRARMDQRRLLRRGRRGRRIDRSIPFAQRSHRQKRFDNRRGNKLPPSIRAARQLELRVITELSKLFPIVAIGYERVAARTKKGCNFSPVQVGQDWAIEQMSKLAPVYQIKGWQKDGNGTSQIRKFLGLEKDKTNKSHAEPETHSVDGVAIASSYFVKFKSCHRFKEDGKSCFGSVGITPSVFKIITRFGAVKRGKQYGFYRRQLHFEVPAKGDVRKRKGGTVTPWLFRIGDFVSSTKGKAAVTGYIGGYSEPNKVVSIYDWQWKRIGQFLVGKTKLLRRSNGLCVA

SEQ ID NO: 626 - protein, 338 aa, Microcystis sp.
MARVPVISKDGKPLMPTKPSRARRWIKEGKAIGKFNDLDIFYVQLTDEPSDNKTQPIAIGIDPGKLFSGIGVQSSFFTLWKTHLELPFNLRAHRQKRFSNRKQGKLAPSIKANRQLELRVVSELTKIYPITDIYFEYIKADVDLTSGRKGAKSGKGFSSVMVGQKWTIEQLSKLATVHTRFGWQTSNLRKHLRLEKSKNKAEQSPESHANDGIALACFQFLDYLPFHNSNSHGYDWKGYVKVTNAPFAVIKRPPISRRQLHLMVFSKGGKRRKYGGSTTRHGFRKGDLVSSPKGIGYVSGDTEKQLSVSDTNGQRLGQIAVSKIQLIRRSNGLIVSRR

SEQ ID NO: 627 - protein, 392 aa, Spirulina sp.; identical to SEQ ID NO: 185

SEQ ID NO: 628 - protein, 342 aa, unidentified
  REGION 1..342: note = Candidatus Poribacteria bacterium
MFVPVTSKSGKRLMPTHPNKAGVLIKKGLATPYWSNGIFCIRLNYETKEHTQEIAVGVDPGSKKEGFTVKSEGHTYLNVQADAHNKVGKKVEKRRELRRSRRSRKCPNRKNRTNRLANRERIPAGTRARWDWKLRILDWLSKLYPITHVCVEDIKARTLQRAKKWNQSFSPLEVGKQWFYTKIEKRWELRTPQGWKTKEIRDRLGLKKSSKKLAETFEAHCVDSWCLAYHAVGGEGIPDNTSIFCISPIRIKRRELHRQQESKGRKRSRQGGTVLGKGLIKNTLIKHVKYGLTRLAGINARGLFSIYTLEGNKRLTTDAKRSDFRLLTRLNFNYRSGHSSQT

SEQ ID NO: 629 - protein, 340 aa, unidentified
  REGION 1..340: note = Candidatus Poribacteria bacterium
MFVPVTSQTGQKLMPTRANKAGMLIKKGLATPYWSNGIFCIRLNYVTEAEYTQDIVVGVDPGSQKEGFTVKSESHTYLNVQADAHSGVGEKVEKRRELRRGRRSRKCPNRKNRTNRLANRARIPAGTRVRWDWKLRILEWLSKLYPVTHVCVEDIKARTIERAQKWNTSFSPLEVGKQWFYTEIRKRWELRTLQGWQTKEIRDRLGLKKSSKKLAETFDAHCVDSWCLAYHTVAGDNLPDNTTLFCISPIPIRRRELHRQNPQKGGKRPRYGGTTFNGLVKNTLVKHIKHGLTRISGFGKTGISLYSLEGKRLCQNAKISDCKVLTRLNFNYRSGVSSPT

SEQ ID NO: 630 - protein, 335 aa, unidentified
  REGION 1..335: note = Candidatus Poribacteria bacterium
MFVPVVDKNRNPLMPTTPARARKWVKSGKATPFFRNGVFCVRLNVEPSATQTQDIAVGIDPGSKKEGFTVKSEKSTYLNVQADAHNKVSKKVETRRELRRGRRSRKCPNRKHRTNRMANKQRLPAGTRTRWDWKLRILNYLSTMFPITHVCVEDIKAQTQKGARHWNESFSPLEVGKQWFYAEIQKRWILVTLKGFETKAIRDSLGLKKSGNKMSNDFNAHCVDSWCLAYHVIGSDTDQVDNTCVFCVSPIPIARRQLHRQNPQKGGRRPRYGGTMCNGIAKNTLVKHVTYGLTRVSGYMEQKGYSLYALGGKRLTQSARRESFKVLTRLNFNYI

SEQ ID NO: 631 - protein, 382 aa, Anabaena sp.
MRVPVISVDNTPLMPTKPSRARRWIKCGKAIGKFDKLGIFYVQLLAESSNTETQEIVLGLDPGKLFSGIAVQSKKFTLQMLHLVLPFKTVKDRMDQRSMMRRNRRGRRINRKLSFNKRNHRQARFDNRRGSKLPPSIRANKDLEYRVISLLLQLYPIKTVVIEEVEARGNKGFSPVMVGQRYQISRLSKLTNVVLKKGWETSNLRKYLGLHKEKSDKSLQIPETHAVDAVALASSEFVKYQTWEGAKNHGASWIGGVDITESQFTIVRRPPISRRQLHLMTFSEGGNRRKYGGTTTRHGFRKGDFVEATQGSKTFFGWVSGDTEKAVSVSDANWKRLGQCTVKKVKLILRSTSLIITAVKTARVASLSARFVTEFPAYREVL

SEQ ID NO: 632 - protein, 341 aa, Chloroflexi sp.
MPCTPAKARHLFKGGLARPKRNKLGLFYVQLCYQQQPDNQSLTVGIDPGSAFEGFSVVGTRDTVVNLMVEAPDHVKEAVEGRRTMRRTRRSRKWRRPKRFDNRLNRKKRIPPSTRSRWEAKARIVKQLCAILPINSAVVEDVQAVTRTGKHRKWNAAFSPVQVGKDHLYGLLCKMGLTLHLKEGWQTKALRETYGLKKTNRKSKQSFESHAVDAWVLAASHSGAKKPTCTRLWYIVPARLHRRQLHRLQASKGGIRKPYGGTRSLGLKRGTLVRHTKYGWCTVGGFDRKKQTISLHVYRSNKRLTQGAKVKDCRICTWMAFRSWLVSLNSKKGGAAFPPAP

SEQ ID NO: 633 - protein, 386 aa, Coleofasciculus sp.; identical to SEQ ID NO: 366

SEQ ID NO: 634 - protein, 364 aa, Planktothrix sp.; identical to SEQ ID NO: 41

SEQ ID NO: 635 - protein, 364 aa, Nostoc sp.; identical to SEQ ID NO: 414

SEQ ID NO: 636 - protein, 385 aa, unidentified
  REGION 1..385: note = Ga0373625_0200948
MQGLKESDCTPQAIGTSGEPFNSISESCKPMHHGGCGYNRKGCLSTHSVFVIHKDGTPITPTKSARAKKLMKTGVAKPVWNKFGQFGIQMLVETRKEIPNTAMGIDNGTVFEGYSVVCGKENNINVMWKLPDKKNIVDKITEKKLLRRERRRRNKRKRAWKWDNRKIKSFIAPSQLVIVNSRLKAIKEILKTYPIKLVGIEDVIFNHAKNKNGKNFSTIEYGKNKIYEFIEKYAILHKFRGFQTQKLRKLYGYAKVKNKSTEKFSAHCCDSLALAIALTTNNHIDIGKFIIVDDSYRPVRRRLHYTNSVKSNIRRPYSKGNFMSMRKGSMCNFGLFCGGTKTYIRIYNWSHKRTAKSVKKIKWLSKRFFIKNIDGIRVQRQKNGK

SEQ ID NO: 637 - protein, 344 aa, unidentified; identical to SEQ ID NO: 474
  REGION 1..344: note = Oscillatoriales cyanobacterium

SEQ ID NO: 638 - protein, 392 aa, Acaryochloris sp.
MILRIPVISPEGEPLMPTKPSRARRMVRDGKAVGKWNDAGIYYIQLTADPSGTQTQPIHLGCDPGTSYSGIAVQSAHFTLYTAHLVLPFQRIKERLGATVIKNGKVIKNVRGKALQRRVRRGRRINRKIAFHLRAHRQKRFSNRRQSKLPPSIKASRLMEIRVITELSKIFPITSIIYEVVKADVDRTSGRMGARSGKGFSPVMVAQYWAMEQLEVIAPVIKRHGWQKDGNGTSQIRKHLSLIKCTDKKAQMPEAHAVDGIALAASQFVRYKIVQTTDEHGYEWRGSVETTPSEFRIITRPAYFRRALHFDNPGKGGVRKRKGGTVTPFGFRAGDKVQVATKGQVITGWVGGFTDTSKSKKVSVYDVNWKRLGQYGLKQISMIRRSNKLCVI

SEQ ID NO: 639 - protein, 417 aa, unidentified
  REGION 1..417: note = Ga0315294_10001984
MQTLTRRLGESRVSGVKGYKHDRMRDLVLSSASEPLNGTATVSSSLSLPCSVEGHKTPKGGRISPTLKVPVVGIDGKPLMPTTPQRARKLLKDGVAEKRWNKLGQFYIQMLRRVGIEKQPVCLAEDPGSKWDGVTVVSKESVLTCAMLVLPSKVAEKLEQRRRMRRARRYRNTPRRAKRFDNRRRPNGWIAPSQKAKVDFRIEIVDELCKIYPINQFAAEDVRFNHYMKRWGKHFSTVEIGKAEFYKHLKELGELTLYMGIETAELRKKFGLSKNPVKKELSWDTHAVDAIAIGCTELSCENPYPPEFWVWKRFEYARRQLHRLEPDKGGIRRRYGGSWSISPFRKGDVVQYQNGLARVGGFMDDLSLHRFSLANKRFTQTAKLGECKRLFNQQIFSKYENPQFLPPINGVGFLGGF

SEQ ID NO: 640 - protein, 396 aa, Microcoleus sp.
MLRVPVLSKSGKPLMPSLPSRARRWLRDGKAKVVHNDLECFAIQLTFETEENTQPIAVGIDPGKRYSGIGVQSALVTLWMGHLVLPFKTVKERMELRRIMRRARRGRRINRELSYSERCHRQARFENRRQGKLPPSIRANKQLELRIVKELFKLFPISTIHYELVMADVDKSSGRKSARSGVGFSPVMVGQRQMLTWLSELAPVVTHKGWQRDGNGTSQLRQWLGLAKDKKDKSNQTPVTHAVDGVTLAAFEFIRWREWHSDNVKHGDWTGNVHISSAPFAVIRRPPISRRQLHLCVPSKGGKRRKYGGTVTRHGFRKGDKVIAEKAGKTYTGWCSGDTKTQVSVSDVNWKRLAQFTAKKVQFLQRSTGLIVRIERSRNVVPSTGLSNLPLLKGSI

SEQ ID NO: 641 - protein, 358 aa, Chloroflexaceae sp.
VRVPVIDANGTPLMPCTPAKARHLLKQGKATSFWNKLGLFCIRLAYVVEHPDHQPLVVGVDPGATYEGFSVVGTQDTVVNLMVEAPTHVKHAVEQRRVMRRGRRYRKCRRRPARFDHRTRPPGWVPPSTRSRWEAKARIVAQLQKVLPLTDVVVEDVSAETRPGKRRGGKTRKWNAAFCPVQNGKQHLYRLLRGMGLTLHLRQGYETKALREQYGLKKSKSKQQRTFASHAVDAWVLAAQVSGAAYPTDPRIRYVVPVRVHRRQLHRFQPSKGGVRTPYGGTQSLNFKRGTLVRHPKHGLCAVGGCDRKRQTISLHAYRTNQRLTQGARTGDCQRLTVVAFRSWLVRRKEDGGAAKTR

SEQ ID NO: 642 - protein, 333 aa, Calditerricola sp.
MQYVPVLSADGKPLMPCHPARARELVRKGRAVRRFRKGFFYIRLLNRTDGEVQPVACGIDPGSKWEAFSIVGPKRTYLNLHIDAVTHVKENVEKRRMLRRNRRYRKTPNRKPRFNRARGGIPPSTRARWGWKLRIAGFLKGLYPISVFVVEDVKAHTKQGKKSWNVSFSPLQIGKQWFYEELRKLSPVVTRSGWETKQFRETFGLHKTSRKSAETFFAHAVDAWVLAASEVGATQPNYTGLIRMVPLQFRRRSLHLENPQKGGKRRRHGGGTSFGLRRGAQVLHPKFGFCYVGGTMQDRLSLHDARTGKRLTQRAKIDDLVFLCNASWRIWKI

SEQ ID NO: 643 - protein, 326 aa, Fischerella sp.; identical to SEQ ID NO: 140

SEQ ID NO: 644 - protein, 364 aa, Nostoc sp.; identical to SEQ ID NO: 245

SEQ ID NO: 645 - protein, 349 aa, Calothrix sp.; identical to SEQ ID NO: 101

SEQ ID NO: 646 - protein, 288 aa, unidentified
  REGION 1..288: note = Candidatus Poribacteria bacterium
MVYFVSDLTMRRRTNKRRELRRSRRSRKCPNRKHRKNRGANKEKIPAGTRARWDWKLRILDWLSKLYPITHVCVEDIKARTIEHAKKWNQSFSPLEVGKQWFYTEVEKRWKLLTLQGWETKEIRDRLGLKKSSEKLSETFNAHCVDSWCLAHHTVGGVSIPDNTDIFCMVSPIPIKRRCLHREQEAKGRQRNRYGGTVLGNGLVKNTLLKHVKYGLTRLAGVNAKGLFSIYTLAGKRLTTGAKRNDFRVLTRLNFNYKSGHSSLGSPPVTGKGLKHGVSCPKIDEKDR

SEQ ID NO: 647 - protein, 257 aa, Coleofasciculus sp.; identical to SEQ ID NO: 488

SEQ ID NO: 648 - protein, 297 aa, Moorea sp.; identical to SEQ ID NO: 382

SEQ ID NO: 649 - protein, 337 aa, unidentified
  REGION 1..337: note = Candidatus Poribacteria bacterium
MFVPVKTKDGEQLMPMHAARARKLVKRDEATPYWHNGIYCIRLNKEPSDRKTQAIAVGVDPGSKKEGFTVKSEAHTYLNVQADAHKDVGKKIEKRRELRRGRRSRKCPNRKNRTNRLAQKKRIPAGTRARWEWKLRILDWLSKLYPITHVCVEDIKARTIERAKKWNQSFSPLEVGKQWFYTEVKKRWSLLTLQGWETKEIRDSLGLKKSKQKLSATFEAHCVDSWCLAYHIVGGDSLPDNRDIFCISPIPMRRRELHRQNPQRGGKRPRYGGTMCLGIVKNTLVKHVKHGNLLRVTGYNTRGGLNLSEIASSKQVVRGAKPNTFRILKRLNFQYST

SEQ ID NO: 650 - protein, 365 aa, Planktothrix sp.
MRIPVVDQNNKPLMPTTSARARKWIESGKAVKCWSDCGQFYLQLTVEPSGYTTQNIVIGIDPGKKFSGIGVQSAKFTLYTAHLILPFQTVRERMDIRRLMRRSRRGRRINRKVEFSKRTHRQKRFNNRRRQGKLAPSIRANRQLELRIVSELFKIYPVAEIRYEYIKADVDLTSGRKQAKSGKGFSPVMVGQKWMLSQLEKLVPVVKIEGYRTASTRKYLGLKKNKTDKSKPEFNTHAVDGVAIAATAFVEYRSYHTAKTDGANWFGNVVITTAQFRVIRRPPFSRRQLHLMLPAKGGVRRKYGGSTTRHGFRKGDLVKSPKGVGYVSGDTERQVSVSDANWKRLGQIASSKVQLIRRSNGLIVT

SEQ ID NO: 651 - protein, 470 aa, Microcoleus sp.; identical to SEQ ID NO: 536

SEQ ID NO: 652 - protein, 366 aa, Nostoc sp.; identical to SEQ ID NO: 330

SEQ ID NO: 653 - protein, 365 aa, Scytonema sp.
MLRIPVVDKEQKPLMPTTCARARKWIEKGKAVKRWSDAGQFYVQLLVEPSGRNTQDIVIGIDPGKKFSGIGVQSAKFTLYTAHLILPFQAVRDRMDARRLMRRGRRGRRINRKVEFSKRAHRQKRFDNRRQNKLAPSIRANRQLELRVVSELCKIYPVSEIRYEYVRADVDLTSGRKKAKSGKGFSPVMVGQKWMLHQLKEFAPVVKIEGYQTSNTRKYLGLEKNKTNKSKPEFSTHAVDGVSIAATHFVEYRQYHTTKVDGGKWFGNVVVTDSLFKVIRRPPYSRRQLHLMVPAKGGVRRKYGGSTTRHGVRKGDLVNSPKGIGFVSGDTEKQLSVSDASWKRLGQIASSKVKLIRRSNGLIVA

SEQ ID NO: 654 - protein, 263 aa, unidentified; identical to SEQ ID NO: 421
  REGION 1..263: note = Candidatus Poribacteria bacterium

SEQ ID NO: 655 - protein, 329 aa, unidentified
  REGION 1..329: note = Ga0373629_0012366
VFVPVISKDRKPLMPTTPDRARNWLKKGKATPFWSNGVFCVRLNAEPSDTKKQDIVVGIDPGSKREAFTVKSEAHTYLNILADAVTWVKDAVEARRDLRNNRRQKKTLYRQNRMNKARGGIPPSTRARWQLKLRIVNRLRRVFPITDFVVEDIKVVTKGKRKWDVSFSPLEVGKNWFYDELGKLGNLETRQGYETKELRDTLGLKKIGNKMSESFDAHNIDSWVLANSSVDGHTVPDNTTIKRIVPLRFHRRQLYRFNFERGGRRRRYGGTMSLGLKKGSLVKHQEHGLCYIGGNLNGRLSIHFLNTGKRIRQDAKIEDVKFLSYSTFR

SEQ ID NO: 656 - protein, 405 aa, unidentified
  REGION 1..405: note = Ga0315275_10046509
MEKTTRTRLQAPENAPLILCSAGESLNPTSLQTPLTKRENSMLCSHSGSGCNTKCGSMSPKHSVFVLSKQGNPLTPTTPTKARKMLEGGVAEPIWNKFAQMGIRMLVDTRIETPKTALGVDFGTKFEGYAVAVGNENNLAVMWKLPDKKKIVKKLEERRQLRRARRWRTCRRRECRFANRSRKDFLAPSQKMMVQSRMKVIAEFFRCYPIDAVALEDVKFNHRDKRWGKNFSTIEIGKAQINRWIRMKSGLAMFTGNDTGDCRARYGYKKSSDKGAEVFNAHCSDALAIATDLYAQGHITQGKFIIADDTYRPVRRQLHDTQPSKGGVRAKYSAGNFKGVRKGTICQDGQICGGTGNSYFIRNQDNKRIGRSNLDWLSHRFKTHDEVTGAIPPTIEIVGILAPAL

SEQ ID NO: 657 - protein, 343 aa, Richelia sp.
MFVPVVSSENRLLMPTTPSRAKRWIESGKATPFWRKGVFCVRLNREPSNYNYQPIAVGIDPGSKREGFTVKSKSHTYLNIQTHAVDWVKDHVEVRRNMRRSRRFRKTPCRQNRKNRLVNKTRIPPSTKARWQWKLRIVNWLTSMFPVSAFVVEDIKARTWENGRKWNVSFSPLEVGKQWFYSELRKIAKLEIRLGNDTYNLRQNLGLKKSKQKLSNKFEAHCVDSWVLANWYAGGHLQPDNTKLIEVIPLEFHRRQLHRLQHSIGHVRSRYGGTLSAGLKRGSLVKHPKYGFCYVGGWQESPTKKDPGRKTVSLHSLNTGKRLTQNALPADCKFLSYNSWRVA

SEQ ID NO: 658 - protein, 346 aa, Leptolyngbya sp.; identical to SEQ ID NO: 238

SEQ ID NO: 659 - protein, 371 aa, Anabaena sp.; identical to SEQ ID NO: 126

SEQ ID NO: 660 - protein, 339 aa, Microcoleus sp.
MQYVPVVDLEQRPLMPTTPARAERWIKSGKATPFFRKGIFCVRLNVEPSNRHTQPVAVGIDPGSKREGYTVKSKAHTYLNQQFHAVDWVKEAQQTSTNARRARRNRKTPCRQPRQNRSRGGLPPSTKARWQFKIRVVKVFDTIFPIEGIGIEDVKALTKKGCHKWNTSFSPLEVGKKWCYSELEKIAPVTQFDGYTDTYLTRQRFGLKKSKAKLSKVFDAHCVDSWVLAYLLVGGDISPENMVVMECKPIRIYRRQLHVFNPGKNGYRRPYGGSMSQGLKRGGIVKHLSYGKCYVGGEDAKKSRISLHSLGTGKRLCQNAKPTDCKFLAYNSWRTVKPS

SEQ ID NO: 661 - protein, 395 aa, Microcoleus sp.
MIRVPVLSPKGKPLMPAKASRVRRWLKSGKVKVIRNDLGVFQVQLVKEPSGEQTQDIAAGIDPGKLFTGMAVQSKSVTLFLAHLNLPFKTVTKRMQGRAMMRRGRRGRRINRKVPYDQRNHRECRFDNRKGHKIPPSIRANKQLALRVIQELSKIYPFTHVLVEVIKARGDKGFSPAMVGQYWQIEQLEQAGYTVHTQEGWHTSNLRKYLGLPKSKNKAEESPAAHAVDGICLAASRFIRYRQIKGRSGTFLGSITVTPCQFAVISRSPICRRQLHLMIPGKGGKRRHYGGTLTRHGLRKGDYVKAEKAGITYYGYVSGDTKTQVSVSDAKWKRIGRFTTKKVQLLQRNTGLVSTVGLSNLALSEVEGRGLTSIPLRPTSLRSESHEVKRWNGKR

SEQ ID NO: 662 - protein, 372 aa, Scytonema sp.
MKPKKKNQVVTRVPVVSPNGLPLMPTTPARGRKWIQSGKAVGKRNQVGVFYVQLLCEPSGYKTQEVVAGTDRGKAFTGLAFQSKLATIAIFHVCLPGFYKSKKNSKDRQSVTGKMAKRAELRRTRRGQRIDRKKPFKLRNHRQKRFSNRRQNKLPPSVRANREMELRILTEMSQILPISEIRDEACGGNTKKNGKGISPVTVGQEWFRKQASSIAPVVEVDSRDTEKYRNQLGLVKDKLDKSNQTPETHANDAIALASSAFIEYKKFHTTNTYGHHWVGECVITPAPFLVMTRPKLFRRKLYQENRSKGGVLTRLGGTITPFGFRSGDYVKTTDNKNVVYGWIGGFTNTGKTKKDLSMTTIGHASVNFLRPQ

SEQ ID NO: 663 - protein, 353 aa, unidentified
  REGION 1..353: note = Ga0373630_0033251
LAVDPGSKWDGVAAVSKKEVLTCGMLVLPSKVAEKLEQRRQMRRARRYRKAPRRPKRFDNRRRPEGWIAPSQKSKVDFRTKVVDELRKLYPVSRFAVEDVKFNHYRKRWGKYFSTVEIGKAAFYKHLRKLGDLGLYTGVQTAEWRGKLSLPKNSRKNSLIWDTHAVDAIAIGCADLGCENPYLPEFWVWKRFEYTHRQLHRLEPDKGGVRRRYGGSWSIPPFRKGDVVQHRGRLARVGGFMDGGFSLHSFNLKNKRFTQTAKIEECTRLYKRCRKPTPFMGGMNAPEGFWVRMAVGELGCEPTNTDCILHGNKKTSYSTSSPSAVISTTAFSSSVRRHTKLRGRHYGRDSSSR

SEQ ID NO: 664 - protein, 344 aa, Microcoleus sp.
MFVPVVSSENRPLMPTTPSRAKRWIRSGKATPFWRKGVFCVRLNREPSSHNYQPIAVGLDPGSKREGFTVKSKSHTYLNVQTHAVDWVKDHVEVRRNMRRARRFRNTPCRQNRANRLVNKNRISPSTKARWQWKLRIVNWLTLMFPISTIVVEDIKARTWKNGRKWNVSFSPLEVGKHWFYSELKKIAHLEIKSGNDTYNLRQDLGLKKSKQKLSDKFEAHCVDSWVLANWYTGGHIQPDNISLIEIVPLEFHRRQLHRLQHSIGHIRSRYGGTISTGFKRGSIVKHSKYGFCYVGGWQESPTKKDPDRKTISLHSLTTGKRLCQNAMPENCKFLSYNSWRIAN

SEQ ID NO: 665 - protein, 385 aa, unidentified
  REGION 1..385: note = Methanomicrobia archaeon
MSPGLRPGGVIPKVIDMGKGRSGKGTVKRVPVVDARGFPLMPTTPVRARRMLKEGKAVARRNKLGIFYIQLKRAVDPVPKGVQERTQPIAASVDLGSSFAGLSVVGTKDTILNIMTEPVNWVEDALRKRREMRRLRRYRKCRRRKKRFDNRKRPEGWVPPSTKARWDTYLRIIDHLRKIVPITHVGVEEDKARTKKGQKRWNNNFSPLQNGRNYFIKELQKRGLSVTLLPAREVARLRKKHGLTKVKDKAEKIFYSHCVDAWVISAWITGAKQPSCLDIWYAVPLRFHRRQLHRLKPSKGGVRKRYGGTRSLGFKRGTLVKSGYGLCYIGGFDEKRKRLSLHDVKTGKRTTKAAKPDDIRVLTSVSFRSFYIPAIPPQACGTLAG

SEQ ID NO: 666 - protein, 366 aa, Scytonema sp.; identical to SEQ ID NO: 141

SEQ ID NO: 667 - protein, 344 aa, unidentified
  REGION 1..344: note = Oscillatoriales cyanobacterium
MFVPVVNSENRPLMPTTPSRAKRWMRSGKATPFWKKGVFCVRLNVEPSNHNYQPIAVGIDPGSKREGFTVKSKPHTYLNIQTHAVDWVKDRVEVRRNMRRSRRFRNTPCRQNRANRLVNKNRIPPSTKSRWQWKLRIVNWLTLMFPISTFVVEDIKARKRKNGRKWNVSFSPLEVGKHWFYDQLRKIAHLEIRSGNDTYELRQNLGLKKSKQKLSNKFEAHCVDSWVLANWYAGGHIQPDNSSLIEIVPLEFHRRQLHRLQHSTGHIRSRYGGTLSVGFKRGSIVKHRKYGFCYVGGWQESPTKKDPYRKTISLHDLKTGKRLTQNASPTDCKFFSYNSWRIAN

SEQ ID NO: 668 - protein, 409 aa, Moorea sp.
MSRILGRTFECFPSSNLFKTVLSVAVRQDILDSVIEGTSFNSNTFLVRFITMLRVPVISPDGKPLMPTKASRARRWIKKGLATIHQNDLGLFAVQLINQPSGEKTQDIAVGIDPGKRFSGIAVQSNRATLWTGHLVLPYKKVRDRMDTRRMMRRTRRSRRINRKVPYSQRSHRQKRFDNRTNKKIPPSIRANRQLEQRVIKELNSLYPVKSIIYEVVKARGNKGFSPVMVGQYWSISQLEKIAPVTQKQGWETALKREALGLIKDKADKSRQTINTHGVDGIALAATHFSSRKNYYHNRGKLSVPKNCDVTNAVFSVVKRAPISRRQLHLLQFSKGGKRRKYGGTTTHHWFRKGDYVEAVKAKIIYRGWVSGETVKQVSVSDANWKRIGQFTARKVRLLKRATGLIVNH

SEQ ID NO: 669 - protein, 373 aa, Bacterium sp.
MLIVPVVSKDGKPLMPTKPAKARKMIEGGVAKKCWSKTGVFYIQMLIPVGEEVQDMFASLTDDFVLRALAIDPGSKYDGYAVSGGKDVALKAMAVMPQKVNKKVTERRQLRRSRRYRNKRRGKCRFNNRKRREGWIAPSQLVKVQFRIKIVRDLAKIFPLNFIAVEDVRFNHYKKRWGKHFSTVEIGKTILYEELERHGHVTKFAGWQTAEARKYWGIKKSSAKDALIPESHANDALAMLNEVFGDNVDNSCTFMVWRRLEFARRSLHRQNYKKGGIRPRFGGTTNGHHLRKGDIAYGQIGNRQLVGWVCGLPTDKTEAVAIADATGKRLAQCSERKIRLLRRATGVTWESQYIPKPLPVTPILQEPVQLELF

SEQ ID NO: 670 - protein, 365 aa, Microcystis sp.
MARVPVISKDGKPLMPTKSSRARRWIKEGKAIGKFNDLGIFYVQLTDEPSNNKTQPIAIGIDPGKLFSGIGVQSSLFTLWKAHLELPFKRVRERLDNRCLMRRGRRGRRINRQLPFNLRAHRQKRFLNRRQGKLAPSIRANRQLELRVVSELTKIYPITDIYFEYIKADIDLTSGRKGAKSGKGFSPVMVGQKWAIEQLSQLATVHTRFGWQTSNLRKHLRLEKSKNKAEQSPESHANDGIALACFQFLDYLPFHTSNGHGYDWKGYVKVTNAPFAVIKRPPISRRQLHLMVFSKGGKRRKYGGSTTRHGFRKGDLVSSPKGIGYVSGDTEKQLSVSDANGQRLGQIAVSKIQLIRRSNGLIVSH

SEQ ID NO: 671 - protein, 357 aa, unidentified
  REGION 1..357: note = Candidatus Poribacteria bacterium
MGQYISVRNLQTMFVPVVDKNQNPLMPTTPARAAKWIKSGKATSFWKNGIFCVRLNVEPSKRWIQDIAIGVDPGSKKEGFTVKSASHTYLNIQADAHTHTQKKIKNRRELRRGRRSRKCPNRKNRTNRLANRKCIPPSTRARWHWKVRILDWLSKMYPITHICVEDIKARTWKGAKKWNQSFSPLEVGKQWFYSEIRKRWKLSTLQGHETKGIRDRLELRKSSQKVSETFDAHCVDSWCLAYHTIGGNSIIDNTDIFCISPINIQRRCLHRQLPQKGNKRPRYGGTMCLGVVKNTIVKSAKHGLAVICGHNNGYLNLQSIEGGRRISRSTKLSDCKILTKLNFRYKSISKQRKVKQE

SEQ ID NO: 672 - protein, 367 aa, Calothrix sp.
MRVPVLSPDGKPLMPTKPSRTRRWLKEGKAKVVYNDLGIFQIQLIEHPKTTNTQPIAVGIDPGKLYTGIGVQSAKFTLWLAHLQLPFQTVFDRMKQRRMMRRSRRGRRINRKLPFNKRSHREKRFDNRKRRKIPPSIRANRELELRVLTELSLIYPITTVVYEIVKARGDKGFSPVMVGQKWQLENLKKYGEVKQLEGWETANIRQQLGLYKQKDFKSDAIPATHAVDGVALACSAFIKYGMVDSQSMRWKGEVNITPAPFTVIRRPPVSRRQLHLMLPSIGGKRRKYGGTVTRHGFRKGDYVKATQGKKTFFGWVSGDTKTQVSVSDFNWERLGQCTKSKVKLIRRNTGLIVLPSKKLSNLMTSNH

SEQ ID NO: 673 - protein, 410 aa, Mastigocladus sp.; identical to SEQ ID NO: 479

SEQ ID NO: 674 - protein, 411 aa, unidentified
  REGION 1..411: note = Ga0373630_0000125
LSKELRIGGRCATHGELQERPDASPVRTSSAEPLNATPRRGLSSPCIGEGKSNLGHRDAIVSRVPVVSADGTPLMPCKPAKARKLLRDGKALKRWNRLGIFYIQLAFNPGNPTAQPIVAGVDPGSKFEGTSVVGTKDTVLNIMSEAVDWVKGSLEQRRGMRRARRYRKTRCRGCRFDNRLKRSRLPPSTKARWDAKLRVISQLKRIIPVSHVVVEDIGAETRKGSRGWNLNFSPIEVGKRYFYDSLKGIGLEVITKSGKETKAFRDSLGLKKIKSKSRPVFESQCVDSWCLAAMATGAKYPTTRGLYYLVPLRWHRRQLHRLEPGKGGVRRRYGGTVSLGLKKGTLVRHVKYGLCYIGGSLRDRFSLHSLKTGGRITQNAERGDLNILTRIAFRTQFLPVLKDGISLGDFR

SEQ ID NO: 675 - protein, 379 aa, Crocosphaera sp.; identical to SEQ ID NO: 310

SEQ ID NO: 676 - protein, 367 aa, Lyngbya sp.
MFNKRVPVLNPDGSPAMPTKSSRARRWVRDGQAIVVQNDLQVFCVQLVEEPTGREMQDISLGIDPGSCFTGVAVQSKRDTLIGLNLNLPKKQVQKRLTERAVLRRTRRGRRIKRSLSFKKRNHRQKRFDNRRQSKLPPSIRANKQLELRVVDELRQLYPITHAYIERLNKSDSPGFTVAAQGQTFLIKELGKYFPVALVKGWETSATREWLKLPKSKNKAEQTPNAHVSDAIALASRHFIRYAPNTTGFQTGYQWKGVIQVTPFTFGIVERLPSRPRKMHDLTVKKGGIRDTYGGMKRTHSFKNGDYVEYKTRRSTLKGYISANDLYQFFPKKKRLKQGVTDKNTRLLRYSSHLVVNLHKGLAFLSR

SEQ ID NO: 677 - protein, 392 aa, unidentified
  REGION 1..392: note = Cyanobacteria bacterium sp.
VGEGAYNFVERIISMKRVPVLASDGTPLMPTKPSRARRWLKDGKAVVVHNDLDVFCVQLVTEPSGYEMQPIVIGVDPGKRFSGIGVQSASTTLFIAHLILPFKNITQKMSGRRFLRRTRRGRRINRKITFHLRAHRQKRFTNRRRNRLSPSIRANRELELRVVKELMQLFPISHIVYEYVKAQTNKGKGKSFSPVMVGQYKMVEWLKQLCPMTTQEGWQTASLRRQLNLEKDKTNKAAPKPSTHAVDGIALAASYFIQFKAFHTNNSRGHHWVGKVQVTLAPFRVIARSQIFRRQLHFENPVSNTTNYRRRKGGTLTPFGFRSGDFVKAEKAGKTYMGWIGGFTQTEKTKKVSIYDYTWRRIGQFSPNKVHLLQRRTGIVVAKELNKSLTTP

SEQ ID NO: 678 - protein, 351 aa, unidentified; identical to SEQ ID NO: 180
  REGION 1..351: note = Oscillatoriales cyanobacterium

SEQ ID NO: 679 - protein, 335 aa, unidentified
  REGION 1..335: note = bioreactor sludge metagenome
MIRTPFVPVVDKNQQPLMPTTLSRAKRWIASRKATPFWKKGVFCVRLNVEPSGNVKQEIAVGIDPGSKKEGFTVKSAAHTFLNIQADAVTDVKGRMDECRNARCARRYRKTPCRQPRANRACLRKDRIPPSTKARWQWKLRVLVVLRKMFPVTHVIVEDIKAVTNGQEAWDKSFSPLEIGKSWFYSQIFGVQTKQGYETKELRDQLGLKKSKAKLSKCFEAHCVDSWVLANSVVGGHLKPDNKLVMYVAPLRFYRRSLHWMDTQKGGARRRYGGTMSLGLKRGSIVRHKKIGIAYVGGNINDRLSLHAMSGERLGKYYKTIDCKFVSYNSWKVLN

SEQ ID NO: 680 - protein, 388 aa, Merismopedia sp.
MLRVPVVSKSGKPLMPTKASRARRWLREGKARIFHNDLNIFAVQLLTETGGETQPISVGIDPGKMYSGVGVQSAQATLWMAHLVLPFKTIIERMEQRRVMRRARRGRRINRQIPYHQRCHRQKRFNNRRQGKLPPSIRANKQLELRVVKELMQIYPIRTIHYELVMADVDKTSGRKGAKSGVGFSPVMVGQKQMLQWLSKLATVVTHKGWQKNCNGTSQLRKWLKLEKDKKNKANQTPATHAVDGVTLAAFEFIQWKEWHTSKSKHGAWVGDVRITPAPFAVIRRPPVSRRQLHLCLPAKGGNRRKYGGSVTRHGFRKGDLVIAEKAGKSYRGWVSGDTKTKVSVSDGNWKRLGQFSAKKVQLLQPRVGLIVTPVVGLSKLTPSRGQI

SEQ ID NO: 681 - protein, 365 aa, Microcystis sp.; identical to SEQ ID NO: 472

SEQ ID NO: 682 - protein, 333 aa, unidentified
  REGION 1..333: note = Ga0315284_10054593
VKYVPVVSKTGKPLMPCSNYRANELVCKGKALRRFKSGLFYIKLTEREDGEVQPIAVGIDPGSKREAFTVKSESHTYLNILADAVTWVKEAIERKRNARRARRQRKTPCRQNRMNRAKGGIPPSTKARWQLKLRIVNILRKIFPITDYVVEDISATTKKGCNKWNKNFSPLEVGKKWFYSELRKLGNVEFKEGWWTFEERSTYGLKKTKSKMLESFDAHNVDSWVLANWKVGCHTKPENTEITMMTPIEFHRRQLHRFEPSIGGERTRYGGTMSLGFKKGSIVKHKKYGICYIGGNQEGRLSLHNLDNGKRLCKRAKTEDTQFLAYNSFRKRG

SEQ ID NO: 683 - protein, 353 aa, Trichocoleus sp.
MRIPVVSVNHQPLMPTKPRRARKWIREGFAVAKFNDLGQFYVQLVDEPSGSETQPIVIGIDSGKLYSGIGVQSSKVSLFTAHLILPFQKVKDRMEQRAMMRRGRRNRRINRQVAYSQRAHRQKRFSNRKQRKLPPSIRANRQLELRVVKELCKVLPITGIVYEIVEAKGSKSFSPVMVGQKWALTQLAEFAPVETRKGWETSQLRTQLGLHKQKHQKGDAIPATHAVDGIALACSAFIKYESFHTAKAYGHQWTGEVSVTVAPFKVIRRPPISRRQLHLMVPGKGGIRRKYGGSTTRHGVRKGDLVSSPKGIGYVSGDTEKQVSVSVANWKRLGQISSSKVQLIRRSNGLIVA

SEQ ID NO: 684 - protein, 392 aa, Brasilonema sp.
MRVPVLSPSGKPLMPTKPSRARRWLKEGKARVVHNDLGIFQIQLVVCPRTTNMQPIAVGIDPGKYFTGMGVQSAKFTLWLAHLQLPFQIVRERMEQRRMVRRGRRGRRINRKVAFKVRAHREKRFDNRGGRKIPPSIRANREFELRVLDELSLIYPISTVVYEIVKARGDKGFSPVMVGQKWQLTKLGNDWDDVREVEGWQTANIRQQLGLHKQKYSKGDTIPATHAVDGIALGCSAFTRYGAIDCQSMGWKGHVSITPAPFTVIRRPPVSRRQLHLMVPLKGGTRRKYGGTVTRHGFRKGDLIKTPSGEIGYCSGDTEKALSVSDADWRRLGRFSPKKSRLVQRNTGLIVLPTKRLSNLLAMRVHVACPFGLKPCRRHRTEDSVHATRTNQ

SEQ ID NO: 685 - protein, 316 aa, unidentified
  REGION 1..316: note = Cyanobacteria bacterium sp.
MRVPVISSDDQPLMPTKPSRARGWVREGKAKGFFKDLSQYCVQLLEEPTGTDTQSIAVGVDPGKKYSGLGVQSANYTLWKGHLILPFETVKKRMEQPRMMRRGRRGRRINRKLPYKQRAHRQKRFNHRRGHKLPASIRANRQLEYRVVKELTKVYPICAIYYEDVEAKGDKAFTPVMVGQKFMLQWLEKLAPTHTKLGWETASLRRDLKLEKSRNQGESTPASHAVDGIALASHSFRGMEKINGKNYRGQVWQGEVNLTESPFTVLRRPPVSRRQLHLMVEPLGGVRRKYGGTVTRHGCCKGDYVQASRKDQAFFG

SEQ ID NO: 686 - protein, 364 aa, Merismopedia sp.
MQRVPVISSYNQPLMPTKSSRARRWIEEGKAVSKFNDLGQFYVQLVESPTLSQTQPISVGIDPGKLFSGIGVQSSLYTLWTAHLELPFQRVRERMDHRRLMRRARRGRRINRQLPFHLRAHRQKRFNNRRKGKLAPSIRANRQLELRVVSEIAKIYPVTDIYFEYVKADVDLTSGRKQAKSGKGFTSVMVGQKWAIEQLSKLAIVHTRFGWQTSNLRQHLGLEKSKNKAKKSPESHANDGIALACFRFRDYLPFHTANSHGHEWQGKVQLTGAIFAVVKRPPISRRQLHLMVPAKGGIRRKYGGTTTKFGLRKGDLVNSPKGIGFVSGQTEKQISVSDANWKRLGQISDKKVTLIRRSNGLIVA

SEQ ID NO: 687 - protein, 316 aa, Mastigocladus sp.; identical to SEQ ID NO: 599

SEQ ID NO: 688 - protein, 312 aa, uncultured Microcoleus sp.
MFVPVLDSENRPLMPTTPSRAKRWIKSGKATPFWKKGVFCVRLNIEPSNTHRQPIAVGIDPGSKREAFTVKSKAHTYLNIQTHAVDWVKDHVEIRRNMRCARRFRNTPCRKNRANRLVNKYRLPPSTKARWQWKLRIAKWLTLMFPISTFVVEDIKARTGKNARKWNVSFSPLGVGKQWFYAELEKIARVETKTGNDTYELRQLSELLKSKQKLSNKFEAHCVDSWVLANWCVGGHFKPDNTALIEVIPLEFHAKPVTPIATRSGSHPFEVWWHFECRIQTRFNRQTPKVWVLLRRWLARVAYEERPNSENN

SEQ ID NO: 689 - protein, 366 aa, Lyngbya sp.; identical to SEQ ID NO: 52

SEQ ID NO: 690 - protein, 365 aa, Microcystis sp.
MARVPVISKDGKPLMPTKPSRARRWIKEGKAIGKFNDLDIFYVQLTDEPSDNKTQPIAIGIDPGKLFSGIGVQSSLFTLWKAHLELPFKRVRERMDNRRLMRRGRRGRRINRQLPFNLRAHRQKRSSNRRQGKLAPSIRANRQLELRVVSELTKIYPITDIYFEYIKADVDLTSGRKGAKSGKGFSSVMVGQKWAIDQLSQLATVHTRFGWQTSNLRKHLRLEKSKNKAEQSPESHANDGIALACFQFLDYLPFHTSNGHGYDWKGSVEVTNAPFAVIKRPPISRRQLHLMVFSKGGKRRKYGGSTTRHGFRKGDLVSSPKGIGYVSGDTEKNLSVSDTNGQRLGQMAVSKIQLIRRSNGLIVSH

SEQ ID NO: 691 - protein, 351 aa, unidentified; identical to SEQ ID NO: 180
  REGION 1..351: note = Oscillatoriales cyanobacterium

SEQ ID NO: 692 - protein, 341 aa, Ktedonobacter sp.
MPCTPAKARHLFKGGLARPKRNKLGLFYVQLCYQQQPDNQSLTVGIDPGSAFEGFSVVGTRDTVVNLMVEAPDHVKEAVEGRRTMRRTRRSRKWRRPKRFDNRLNRKKRIPPSTRSRWEAKARIVKQLCAILPINSAVVEDVQAVTRTGKHRKWNAAFSPVQVGKDHLYGLLCKMGLTLHLKEGWQTKALRDTYGLKKTNRKSKQSFESHAVDAWVLAASHSGAKKPTCTRLWYIVPARLHRRQLHRLQASKGGIRKPYGGTRSLGLKRGTLVRHTKYGWCTVGGFDRKKQTISLHVYRSNKRLTQGAKVKDCRICTWMAFRSWLVSLNSKKGGAAFPPAP

SEQ ID NO: 693 - protein, 373 aa, Microcystis sp.
MERVPVISKDGKPLMPTKPSRARRWIKEGKAIGKFNDLDIFYVQLTDEPSDNKTQPIAIGIDPGKLFSGIGVQSSLFTLWKAHLELPFKRVKERMDNRRLMRKGRRGRRINRQLSFDLRAHRQKRFSNRRTGKLAPSIRANRQPFDVAQGQLELRVVSELTKIYPITDIYFEYIKADVDLTSGRKGAKSEKGFSPVMVGQKWAIEQLSQLATVHTRFGWQTSNLRKHLRLEKSKNKAEQSPESHANDGIALACFQFLDYLPFHTSNGHGYDWKGFVKVTNAPFAVIKRPPISRRQLHLMVFSKGGKRRKYGGSTTRHGFRKGDLVSSPKGIGYVSGDTEKQLSVSDTNGQRLGQITVSKIQLIRRSNGLIVSH

SEQ ID NO: 694 - protein, 285 aa, Symploca sp.
MQRVPVISPQGLPLMPTLPSRARRWLREGKAKIYANDLNIFAVQLIVQPSGEETQDLVVGIDPGKYFSGVGVQSSKATLLKLHLILPFPNVTKKMTARRILRRARRGRRINRKLPYDQRCHRAKRFDNRVQKKLPPSIRANRQLELRVVKEACQLFRVSHIVYEYIKARGDKGFSPAMVGQKLMWEWLGEIAPTSTLLGWQTSNLRQWLKLPKDKTDKSKACEETHANDGVALATSHFIKWKEWKDVRRNVRGGCWEGKATITSAPFKVITKPNIYRRQLHFDQS

SEQ ID NO: 695 - protein, 365 aa, Microcystis sp.; identical to SEQ ID NO: 274

SEQ ID NO: 696 - protein, 365 aa, Microcystis sp.
MARVPVISKNGKPLMPTKPSRARRWIKEGKAIGKFNDLDIFYVQLTTESSNNKTQPIAIGIDPGKLFSGIGVQSSLFTLWKAHLELPFKRVRERIDNRRLMRKGRRGRRINRQLPFNLRAHRQKRFSNRKQRKLAPSIRANRQLELRVVSELTKTYPITDIYFEYVKADVDLTSGRKRAKSGKGFSPVMVGQKWAIEQLSQLATVHTRFGWQTSNLRKHLRLEKSKNKAEQSPESHANDGIALACFQFLDYLPFHNSNGHGYDWKGYVKVTNAPFAVIKRPPISRRQLHLMVFSKGGKRRKYGGSTTRHGFRKGDLVSSPKGIGYISGDTEKQLSVSDTNWKRLGQIAVSKIQLIRRSNGLIVSR

SEQ ID NO: 697 - protein, 413 aa, Moorea sp.
LVRTFEYFPSSNLFKIVLSVAVGQDILNSVVVRVAWPTARGRVVNSNTFLVRFITMLRVPVISPDGRPLMPTKASRARRWINKGLAVVYQNDLNVFAVQLVNKPSGEETQDIAVGVDPGKLFSGIAVQSNKTTLWTGHLVLPYKKVRDRMDTRRMMRRTRRSRRINRKVCYSQRSHRQKRFSNRREKKVPPSIRANRQLEQRVIKELSLLYPLRVIVYEVVKARGSKGFSPVMVGQYWSISQLERIAPVIQKQGWETALKREALGLVKDKADKSRLSVNTHAVDGIALAATHFFRRKNYYHSNGKLSVPRNCDVTDATFYVIKRAPISRRQLHLLQFYKGGKRRKYGGTTTSHGFRKGDYVEAVKAGKQARGWVSGETARQVSVSDINWKRIGQFTARKVRLLKRSTGLIVNH

SEQ ID NO: 698 - protein, 288 aa, Tolypothrix sp.
MQYVPVVDFEQRPLIPTTPAMAERWIKSGKATPFFRKGIFCVRLNVEPSNRHTQPVAVGIDPGSKREGYTVKSKAHTYLNQQFHAVDWVKEAQETSTNARRARRNRKTPCGQPRQNRWRGGFPPSTKACGQFKIRVLKVFDTIFPLSGIGIEDVKALTKKGCHKWNTSFSPLEVGKKWCYSELERIAPVTLFDSYTDTYLTRQRLGLKKSKAKLSNVFDAHCVDSWVLAYLLVGGDISAENMVVMECKPIRIYRRQLHVFNPLEKRISPSLRWLHVARIEAWGHYQAS

SEQ ID NO: 699 - protein, 317 aa, Planktothrix sp.; identical to SEQ ID NO: 127

SEQ ID NO: 700 - protein, 344 aa, unidentified; identical to SEQ ID NO: 474
  REGION 1..344: note = Oscillatoriales cyanobacterium

SEQ ID NO: 701 - protein, 344 aa, Microcoleus sp.
MFVPVVGSNNRPLMPTTPARARRWIESGKATPFFKKGVFCVRLNAKPLSHNYQPIAVGIDPGSKREGFTVKSRTHTYLNIQTHAIDWVKDRVEVRRNMRRGRRFRNTPCRQNRTNRSVNKNRIPPSTKARWQWKLRIAKWLTLMFPISTFVVEDVKAKTWKGAKKWNTSFSPLEVGKRWFYSEIEKIAHLEIRHGFDTCKMRQDLGLVKSKQKLSNLFEAHCVDSWVLANWYIGGHIQPDNTKVIEVIPLEFHRRQLHRLQHSTGHVRSRYGGTLSAEFKRGSIVKHPKYGFCYVGGWQESPTKKDPHRKTISLHDLKTSKRLCQNAAPTDCKFLSYNSWRSAN

SEQ ID NO: 702 - protein, 341 aa, unidentified
  REGION 1..341: note = Candidatus Poribacteria bacterium
MFVPVKTKDGQQLMPMHASRARKLVKRGEATPYWNNGIYCIRLNKEPSDRETQDICVGVDPGSKKEGFTVKSKADTYLNIQADAHTHTSKKVAKRRELRRGRRSRKCPNRKQKKHNLSHRHRIPAGTRARWDWKMRILDWLSRLYPITHVCVEDIKARTKQYQKKWNQSFSPLEVGKQWFYSEIEKRWQLSRLVGHETKNVRENLGLKKSSDKTAESFDAHCVDSWCLAYHVLGGDPIVDNTDIFCISPIPIQRRNLHREVPKKGGIRSRYGGTRCLGFTKGTLVKSMKWGLCWISGHQNGKINLTQMTTGKQRPQQKLDSFKVLKRINFRYKEAEATSPS

SEQ ID NO: 703 - protein, 351 aa, unidentified; identical to SEQ ID NO: 180
  REGION 1..351: note = Oscillatoriales cyanobacterium

SEQ ID NO: 704 - protein, 317 aa, Planktothrix sp.; identical to SEQ ID NO: 127

SEQ ID NO: 705 - protein, 381 aa, Crocosphaera sp.; identical to SEQ ID NO: 454

SEQ ID NO: 706 - protein, 372 aa, Fischerella sp.
MRVPVLSPEGKPLMPTKPSRARRWLKSGKAKVAYNDLGIFTVQLVSEPSDTKAQPISVGVDPGKKYTGIGVQSAKTTLWMAHLQLPFETVKQRMEQRRMMRRDRRGRRINRKVPYSQRAHRQARFDHRRSKKVPPSIRANRQLELRVIKELTKIYPLTTAVWEVVVARGDKGFSPVMVAQYWAIDQLKKLLPVATQEGWQTSNLRQWLGLEKQKTKKGDAIPETHAVDGVVLASTQFVQYRTWVTNNACGGSWIGSVEITPATFAVVRRPPICRRQLHLMVPSIGGVRRKYGGTTTRHGLRKGDYVRAQMAGRVVYGWVSGDTERQVSVSDINWKRLGQFSAKKTCLVKRSTGLLVSPHKGLSNLPPLRGQI

SEQ ID NO: 707 - protein, 366 aa, unidentified
  REGION 1..366: note = Ga0315279_10074524
WDEIVTRVPTVSADGTPLMPCRPAKARKLLRNGRAVRKWSKLGVFYIQLRFNPKEPATQPLAVGVDPGSKFEAVSIVGTEDTVFNIMSEAVDWVKATLQRRREMRRARRYRKTRCRPCRINNRLRSQRRNLPPPSTKARWDAKLRIITQLRKIIPFSSTVVEDIKAETKPGQRKWNENFSPLETGKQYFYSQLRHMGLKVETKTGTETRDLRVKFNLKKISDKSRPVFESHCVDAWCLAASVTGAKHPTTRSLYYTVPLRWHRRQLHRLEPDREGIRRRYGGTVSLSLKKGTLVKHVKYGFCYVGGTLKDCVSLHDLKTGKRLTQNAKIQNLKTLTRIAFRTQFFPSADTETRNSSPCLKAGVSLR

SEQ ID NO: 708 - protein, 379 aa, Crocosphaera sp.; identical to SEQ ID NO: 310

SEQ ID NO: 709 - protein, 361 aa, unidentified
  REGION 1..361: note = Cyanobacteria bacterium sp.
MRVPVISSDDQPLMPTKPSRARGWVREGKAKGFFKDLSQYCVQLLEEPTGTDTQSIAVGVDPGKKYSGLGVQSANYTLWKGHLILPFETVKKRMEQPRMMRRGRRGRRINRKLPYKQRAHRQKRFNNRRGHKLPASIRANRQLEYRVVKELTKVYPICAIYYEYVEAKGDKAFTPVIVGQKFMLQWLEKLAPTHTKLGWETASLRRDLKLEKSRNQGESTPASHAVDGIALASHSFRGMEKINGKNYRGQVWQGEVNLTESPFTVLRRPPVSRRQLQLMVEPLGGVRRKYGGTVTRHGFCKGDYVQASRKDQAFFGWVSGDTKSQVSVSDANWKRLGQFSTNKIRLLKHSTNLVTTAKAVI

SEQ ID NO: 710 - protein, 365 aa, Gloeocapsa sp.
MPRVPVISKDNIPLMPTKPSRARKWIKEGKALGQFNDLGIFYIQLTESPSSNQTQPISVGIDPGKLFSGIGVQSPLYTLWTAHLELPFKRVRKRMEKRRIMRRARRGRRINRKQTFELRAHRQKRFSNRKQSKLPPSIKANRQLEIRVVSELSKIYPITGIYFEYVKADVDLTSGRKGAKSGKGFSAVMVGQNWAIEQLSKTAPVHTRFGWETSNLRKHLGLEKSTNKAKQSPESHANDGIALACFHFLQYLPFHTTTSHGHLWKGKVNLTTAIFAVIKRPPVSRRQLHLMVPVKGGVRRKYGGTTTKFGLRKGDLVFTPKGIGFVSGQTEKQISVSDANWKRLGQISSLKVKLIRRSTGLIVSC

SEQ ID NO: 711 - protein, 354 aa, Chloroflexi sp.
VRVPVVDSRGVPLMPCTPAKARHLFKGGLARPKRNKLGLFYVQLCYQQQPDNQSLTVGIDPGSAFEGFSVVGTRDTVVNLMVEAPDHVKEAVEGRRTMRRTRRSRKWRRPKRFDNRLNRKKRIPPSTRSRWEAKARIVKQLCAILPINSAVVEDVQAVTRTGKHRKWNAAFSPVQVGKDHLYGLLCKMGLTLHLKEGWQTKALRDTYGLKKTDRKSKQSFESHAVDAWVLAASHSGAKKPTCTRLWYIVPARLHRRQLHRLQASKGGIRKPYGGTRSLGLKRGTLVRHTKYGWCTVGGFDRKKQTISLHVYRSNKRLTQGAKVKDCRICTWMAFRSWLVSLNSKKGGAAFPPAP

SEQ ID NO: 712 - protein, 371 aa, Dolichospermum sp.
MRVPVISVDNTPLMPTKPSRARRWIKCGKAIGKFDKLGIFHVQLLAESSNTETQEIVLGLDPGKLFSGIAVQSKKFTLQMLHLVLPFKTVKDRMDQRSMMRRNRRGRRINRKLSFNKRNHRQARFDNRRGSKLPPSIRANKDLEYRVISLLLQLYPIKTVVIEEVEARGNNGFSPVMVGQRYQISRLSKLTNVVLKKGWETSNLRKYLGLHKEKSDKSLQIPETHAVDAVALASSEFVKYQMWEGAKNHGASWIGGVDITESQFTIVRRPPISRRQLHLMTFSEGGNRRKYGGTTTRHGLRKGDFVEATQGSKTFFGWVSGDTEKAVSVSDANWKRLGQCTVKKVKLIRRSTSLIITAVKTARVASLSALK

SEQ ID NO: 713 - protein, 367 aa, Limnoraphis sp.; identical to SEQ ID NO: 603

SEQ ID NO: 714 - protein, 226 aa, Nostoc sp.; identical to SEQ ID NO: 271

SEQ ID NO: 715 - protein, 365 aa, Scytonema sp.
MERVPVLSPNGKPLMPTKPSRARRWLKEGKAKIVHNDLNVFCIQLLVEPSGDEQQPIALGLDPGKKFTGIGVQSAKFTLFMAHLILPFSDVTKKMSGRLILRRARRGRRINRKIAFYKRAHHQKRFDNRKQNKLPPSIRANKEMELRVAKELVRLFPVTRITYEYVKAKGDKGFSPVMVGQKVMLQWLEKIAPTSVQEGWQTSILRQQLRLSKDKKNKEKQSPETHAHDGVALAASNFMRFLEFHTANTRGHRWVGEVIITSAPFRVIARPNLFRRQLHFENPVKDVPGNRKRKGGTVTPFGLRSGDLVKAEKAGKVYIGWVGGYTQTAKTKNVSVYDHSWHRLGQFSPSKVQLIKRSTRLCVAS

SEQ ID NO: 716 - protein, 379 aa, unidentified
  REGION 1..379: note = marine sediment metagenome
VSCKVDGTPKGKHSERRGYIPMLRVPVVSKKGKPLSPTTPAKARKLIKGGIAKPQRDKLGNFYIQLTEPTGEKIPHETMVGIDPGKLYSGMAVQTPKSTLWIGHLILPFPEVKKAMKSRAQLRRARRYRKTPQRKIRFLHRTGHKIPPSIKANRELEYRVLKELLKIYPITKVVYEVIKASGSKSFSPVMVGQNWQISRLAKILPTETREGWQTSVIRKHLSLAKEKHDKGKIIPATHAVDGVALAASALIRYEYFETKHGHGHTWRGECKITEAPFSVIQRPKLFRRKLHVENPAKGGIRKRHGGTITPYGFRKGDYVEAEKAGRIVCGYISGFSEANKVVSVADSSWRRIGQFTVSKIRLLRRSSRLLIEHRPCVNI

SEQ ID NO: 717 - protein, 365 aa, Microcystis sp.; identical to SEQ ID NO: 274

SEQ ID NO: 718 - protein, 346 aa, Leptolyngbya sp.; identical to SEQ ID NO: 238

SEQ ID NO: 719 - protein, 410 aa, Mastigocladus sp.; identical to SEQ ID NO: 479

SEQ ID NO: 720 - protein, 282 aa, Microcoleus sp.
MLRVPVLSKRRFNNRKQGKLPPSIRANRQLELRVVKQLCQLFPISAIHYELVMADVDRTRGRKLARSGVGFSPVMVGQGQMLTWLSELAPVTTHKGWQRDGNGTSQLRKWLGLPKDKKNKACSTPATHAVDGVILAAFEFIQWREWHSDHTKHGDWRGDVQITPAPFTIIRRPPISRRQLHLCVPSKGGKRRKYGGTVTRHVETRHGASLRKGDQVIAEKAGKSYVGWCSGDTDQAISVSDANWKRLGQFTAKKVRLLQRSTGLIVAPSVGLSNLTASSGAV

SEQ ID NO: 721 - protein, 313 aa, unidentified
  REGION 1..313: note = Marine metagenome
MTLTPKVFVVDAVGRPLLPTHPARARKLLNTDRACVAQVIPFTIKLKKEISNPVGNFTVGVDDGAKFVGIAIKNDRTEEIVFRATLRLRQDVKRKMTQRAFFRRSRRSRKLRYRSPRYSNRIKSKLPPSIRNRKDSVIRVINDMGKRLPLSGVIVEEVAFDHFNNRFGKNFSLVEIGKTYLKQQLLASGLSYKKTFGYITKPARQGYGMSKTHCNDATAITCPSTIRIACLDYHIWFRRSRSSNTQKKFLEKRGFRHYDVIKASHRTRGTVVGSVSSLKAKRITLRFKEDRNFPVSYNKSKILQRPDGLVYSY

SEQ ID NO: 722 - protein, 385 aa, unidentified
  REGION 1..385: note = Cyanobacteria bacterium sp.
MNRIPVVSKDGQPLMPTKPSRARKWVESGRAVGKWSDLGLYYVQLLEEPSGTETQPVVAGLDPGKSYSGVGVQSAKCTLLQLHLILPFGRVRTRMDQRRLLRRSRRSRRINRDVPFKLRNHRQKRFNNRRGKKLAPSIRASRQLEIRVVKEIATIYPITAIGYEKVRADVDLTSGRKGARSGKGFSPVMIGQQFCISELEKIAPVYVREGWQKDGNGTSQLRTALGLVKDKENKSEAKPETHSVDGVALACGYFIQFRRFHSSRGHGKTWKGKVTITNSQFRIITRPGALKRGKEYGVFRRQLHFEVPSKNGVRKRKGGTITPWGFRVGDLVRATKGKTESIGYIGGYSEVNKVVSLYDWQWKRIGQFSVSKTTLIRRSNGFCVA

SEQ ID NO: 723 - protein, 378 aa, unidentified; identical to SEQ ID NO: 446
  REGION 1..378: note = Ga0373629_0000913

SEQ ID NO: 724 - protein, 371 aa, Symploca sp.
MQRVPVISPQGKALMPTKPSRARKWLKKGKAKIYKNDLNVFAIQLINEPSGEETQDVVIGIDPGKMFSGVGVQSSKATLLKLHLILPFPSVTKKITTRRILRRARRGRRINRKLPYAQRCHRAKRFDNRVDKKLPPSIKANRQLELRVVKEITQLFPVSKIVYEYIKARGDKGFSPAMVGQKVMLKWLEGIAPTATQFGWQTSNLRQWLKLPKDKADKSKAVEETHSNDGVALAASHFIKWKKWYSTKAHGGYWEGEICLTSAWFLVIAKPNIYRRQLHFENPDSKKPNPTQYRKRKGGTVTQFGLRSGDFVQAEKAGQVYRGWIGGYTQTAKTKNVSIYDINWRRIGQFGPNKVKLLKRSTKLLVSSAIS

SEQ ID NO: 725 - protein, 341 aa, Arthrospira sp.; identical to SEQ ID NO: 528

SEQ ID NO: 726 - protein, 201 aa, Coleofasciculus sp.; identical to SEQ ID NO: 235

SEQ ID NO: 727 - protein, 254 aa, Moorea sp.; identical to SEQ ID NO: 493

SEQ ID NO: 728 - protein, 344 aa, Microcoleus sp.; identical to SEQ ID NO: 664

SEQ ID NO: 729 - protein, 386 aa, Calothrix sp.
MRVPVILADNTPLMPTKPSRARRWIKEGKAIGNFNKLGIFYVQLVNKASDTQTQEIVIGLDPGKMFSGVAVQSQKYTLQMLHLALPFKTVKDRMKQRSMMRGGRRGRRINRKLSFSKRSHRQARFDNRRSCKLPPSIQANKDLEYRTISLLCEIYPVKTIVVEEVEARGSKSFSPVMVGQRYQINRLSNLANVELKKGWETSNLRKYLGLHKEKSDKSLQIPETHAVDAVTLACSKFVQYKTWEGIKNHGASWEGNVTITNSQFTILSRPPISRRQLHLMAPSKGGNRRECAGTESSVRQLRRKYGGTVTRHGFRKGDYVEATQGNKTYRGWVSGDTEKQVSVSDQNWKRLGQFSKNKVRLIRRSIGLITTAVKTARVASLSGLKT

SEQ ID NO: 730 - protein, 407 aa, Scytonema sp.
MRVPVLNQNGKPLMPTKSSRARRWLKEGKAKVVYNDLNVFCIQLLIEPSGYEQQPIALGLDPGKKFTGVGVQSAKFTLFMAHLILPFSDVTKKMSVRLILRRARRGRRINRKEPFNQRTHRQKRFDNRKQNKLPPSIRANIELELRVTKELLKLFPVTQITYEYVKAKGDKGFSPVMVGQKVMLQWLEKIAPTNKQEGWQTSILRKQLGLAKDKKNKEKQTPETHAHDGIALAASNFMKFEKFHTANTRGHHWVGEIIVTSAPFRVVARPNLFRRQLHFENPVKNVSGNRKRKGGTITPFGLRSGDLVKAEKAGKVYIGWVGGYTQTAKTKNVSVYDHNWHRLGQFSPSKVQLLKRNTRLCVVSARHWTTSFLRRPAVPPQATPLRSVEPGDSRDSVESVHLPHFLP

SEQ ID NO: 731 - protein, 333 aa, unidentified
  REGION 1..333: note = Ga0373628_0125242
MLYVPVVSATGKPLMPCTTWRANELIRKGRAVRRFSKGIFYIRLLDRAEGVVQPVACGIDPGSKFEGYTVKSGKTTYLNVQADAVTWVKDAVEVRRNMRKTRRSRKTPCRQNRLNRSRGGIPPSTKARWQWKLRLSRWLASLYPISVFVVEDIKAVTKGKRKWDVNFSPLEVGKQWFYKELDQIAPVQAKRGWDTKAMRDALNLKKTGDKAAKHFGAHCVDSWVLASSAVGGVKPDNTDIRFVAALRFHRRQLHAFQPAKGGVRRPYGGTRSLGFKRGSLIKHPKFGLCYVGGTMGGRISLHSLDSGSRLCQNAKPEECVYLAYLGWRTRRSA

SEQ ID NO: 732 - protein, 418 aa, unidentified
  REGION 1..418: note = uncultured cyanobacterium
LVQTSESFPSSDLSNPDWYRSWVKPRHLNQVGRRDLNSFGLYQIMRIPVVSNENQPLMPTTTARARKWIEAGKAVKRWSDSGQFYVQLTVESSGYATQDITIGIDPGKKYSGVGVQSAKFTLYTAHLILPFPTVKDRMEARRLMRRGRRGRRINRKIVFSKRAHRQKRFENRRQGKLAPSIRANRQLELRIVSELCKIYPVTEIRYEYVRADVDLISGRKKACSGKGFSPIMVGQKWMVNQLKQLAPVITIYGYQTANTRRYLGLNKNKADKSKTEFETHAVDGVAIAASHFVEYHQYHKVKVSGGNWFGSVAITFASFFVIRRPPYSRRQLHLMVPAKGGIRRKYGGSTTRHGVCLCLRHATLRKGDLVNSPKGIGYVSGDTEKQISVSDANWKRLGQIASSKVTLIRRSTGLIVAR

SEQ ID NO: 733 - protein, 397 aa, unidentified
  REGION 1..397: note = Ga0373628_0023257
MQELKQLQDTPQVLDNWEESFNSMSDNAKQRSKHLHYGGCGCNRKGRLSTHSVFVIHKDGTPITPTKSQRAKKLLESGVAKSVWNKFGQFGIQMLVETRKETPKTALCIDNGTKFEGYSVVCGTENQLNVMWKLPDKKKIVKKLEERKNLRRARRHRNCRRRPARFDNREKDGFIAPSQMVMVNSRLKAIKEFFRCYPISLSGIEDVRFNHAKFRHGKNFSTVEIGKTKIYGFLESRAKLYKFAGYQSQKLRKMYGYTKTRVNKASEKFSSHCSDSLTMAIALTTNQHIHRGKFIVADDSYRPVRRRLHDTQFSKGHIRYPYSQGNFKSIRKGSVCNFGLVVGGSKAYAKIDNWLHKRTTKSVKKIGWLSKRFFIIEERAKFPNHTSMVVPFGSLGS

SEQ ID NO: 734 - protein, 344 aa, Tychonema sp.
MFVPVVDSENRPLMPTTSSRAKRWMCSGKATPFWIKGVFCVRLNVEPSNTDRQPIAIGIDPGSKREGFTVKSKSHTYLNIQTHAIDWVKDHVEVRRNMRRARRLGRSPCRQNRANRLVNKNRIPPSTKARWQWKLRIVNWLTLMFPISTIVVEDVKARTWKNGRKWNVSFSPLEVGKHWFYSEIIKIAHLEIKSGNDTYNLRQELGLKKSKQKLSNKFEAHCVDSWVLANWYAGGHTQPDNTKLIEVIPLEFHRRQLHRLQNSTGHIRPRYGGTLSVGFKRGSIVKHPKYGFCYVGGWQEFPTKKDPYRKTISLHDLKTGKRLCQNAMPIDCKFLSYNSWRIAN

SEQ ID NO: 735 - protein, 361 aa, cyanobacterium sp.
MFVPVVDSNQRPLMPTTPSRARRWIKSGKATGFWKRGIFCVRLNVEPSNRNTQPIAVGIDPGSKREAFSVKSQAHTYLNILAHAVDWVKDAVETRRNMRRTRRGRKTPCRQPRANRLVNTQRLPPSTKARWQWKLRICQWLTKMFPVTVFVVEDIKAKTWKNGKRWNASFSPLEVGKSWFYNQLRQLGIIETKSGLETKELRDSLGLKKTKNKLAEKFEAHNVDSFVLANWYTGSHEKPDNTQLLVAIPLRFHRRQLHRLEHAPGSVRPRYGGTISAGFKRGAIVCHKKHGICYVGEFMDSPTKKDKKRQVISLHSLETGKRLTQNALTIDTKFLTTPGELDMLPRSCPPFPPPLTASQYR

SEQ ID NO: 736 - protein, 344 aa, unidentified; identical to SEQ ID NO: 667
  REGION 1..344: note = Oscillatoriales cyanobacterium

SEQ ID NO: 737 - protein, 297 aa, Microcoleus sp.
MQYVPVVDFEQRPLMPTTPARAERWIKSGKATPFFRKGIFCVRLNVEPSNRHTQPVAVGIDPGSKREGYTVKSKAHTYLNQQFHAVDWVKEAQETSTNARRARRNRKTPCRQPRQNRSRGGLPPSTKARWQFKIRVVKVFDTIFPLSGIGIEDVKALTKKGCHTWNTSFSPLEVGKKWCYSELERIAPVTQFDGYTDTYLTRQKLGLKKSKAKLSNVFDAHCVDSWVLAYLLVGGDISPENMVVMECKPIRIYRRQLHVFNPLEKRISPSLRWLHVARIEAWGHCQASIVWKVLRRW

SEQ ID NO: 738 - protein, 642 aa, unidentified
  REGION 1..642: note = Ga0373625_0150781
VVSKGIISQLLKTTIKMETRVVKIITCNSERDLKDLVRDGDGRLKTTEPIARGRVRDIEGASLALSPSIGQSRREQLPELSAKVIQRKVPVMVPVLSVEGKPLMPCHPARARELIKKKGAKERWYRGIYAIQLIHKNGSFLQNSVCGIDSGFYREAFTIQSVDHTYLNVLSDAVCWVSTRVENRRNSRKSRRGRNLPCRKSRSNRMNKKSWLAPSIKSRWDIKLRIIDFLKKLYPITTYVIEDINAKNKKNCRRWNRVFSPLQTGKNWFYYRVEKTGELILKKGYETYIRRDLFGFKKLKDKFSESFYSHNIDSWVLASFVTGKRDLDMTKVFRMVPLKFHRRVLHNLSPAKGGYRKKFGGTMSLGFKRGSVIYHKELGYAYIGGTADGRVTIHNIVTGNILTSRAFPADCKFIYFNNWRTVFIDECGNFIGKRHRDIFLKIEYCTPEIIEKKRQTNLKRYGVEKYTNREQAKKTSLERYGVEYTCAVPEIIEKRVATLMERYGRVFNVDEPHNKFHLENKEKFIQDYESGLILGDLAIKYKISEPTLSRIIKDLGLSRTVVKAKSYVIDTPSEATSDYLKACLENNKILSFYEYGKIKGQQYCTKMKRWFNKGRLYNNLLEELKSVALCAEEHETFLNKLR

SEQ ID NO: 739 - protein, 365 aa, Microcystis sp.
MARVPVISKDGKPLMPTKPSRARRWIKEGKAIGKFNDLDIFYVQLTDEPSDNKTQPIAIGIDRGKLFSGIGVQSSLFTLWKAHLELPFKRVKERMDNRCLMRRGRRGRRINRQLPFNLRAHRQKRFSNRRQGKLAPSIRANRQLELRVVSELTKIYPITDIYFEYIKADVDLTSGRKGAKSGKGFSPVMVGQKWAIEQLSQLATVHTRFGWQTSNLRKHLRLEKSKNKAEQSPESHANDGIALACFQFLDYLPFHTSNGHGYDWKGYVKVTNAPFAVIKRPPISRRQLHLMVFSKGGKRRKYGGSITRHGFRKGDLVSSPKGIGYVSGDTEKQLSVSDTNGQRLGQIAVSKIQLIRRSNGLIVSH

SEQ ID NO: 740 - protein, 388 aa, Merismopedia sp.; identical to SEQ ID NO: 277

SEQ ID NO: 741 - protein, 349 aa, Thermodesulfitimonas sp.; identical to SEQ ID NO: 609

SEQ ID NO: 742 - protein, 365 aa, Planktothrix sp.; identical to SEQ ID NO: 112

SEQ ID NO: 743 - protein, 366 aa, Scytonema sp.; identical to SEQ ID NO: 141

SEQ ID NO: 744 - protein, 365 aa, Microcystis sp.; identical to SEQ ID NO: 154

SEQ ID NO: 745 - protein, 333 aa, unidentified; identical to SEQ ID NO: 731
  REGION 1..333: note = Ga0373625_0019996

SEQ ID NO: 746 - protein, 389 aa, unidentified; identical to SEQ ID NO: 615
  REGION 1..389: note = uncultured cyanobacterium

SEQ ID NO: 747 - protein, 344 aa, unidentified
  REGION 1..344: note = Candidatus Poribacteria bacterium
MNFVPVKDKTGNQLMPTTSVRAALMIKCGDATPYWDNGIFCIRLNREPSSRYKQQIAVGVDPGSKKEGFTVKSESHTYLNVQADAHTHTKKKIEKRRQLRSGRRSRKCPNRQNRMNRLVNKERIPASTRARWHWKLRILDWLAKIYPITRVCVEDIKAKTWKGAKKWNQSFSPLEVGKQWFYTEVRKRWQLFTLQGHETKDIRDSLGLKKSSKKTEDVFDAHCVDSWCLAYHTIGGEPIVDNSDIFCISPINVQRRCLHRQLPQKGGKRPRYGGTMCLGIVKNTIVKHVKHGLAVVCGHNNGYLNLQSIESRERISRSTKLSDCKILTKLNFRYKSISNLSCYF

SEQ ID NO: 748 - protein, 291 aa, Okeania sp.
MIRIPVQNPDGSPVMPTKASRARRWVKQGKATEHWNDAGLYYVRLVAEPSGSETQKITIGCDPGKNYTGIAVQSAKFTLYTAHLVLPFERVKERLGSTVIKQGKVIKNVRGRALQRRIRRGRRINRKVPFNQGAHRQKRFDNRRKKGKLAPSIRASREMEIRIIIELSKVFPITTIVYELVKADVDLTSGRKKARSGKGFSPVMIGQSCCVEKLKSIASVKTVYGRQKNNNGTSQMPLAEELRFRKHLGLEKIKDKKAQVPESHAVDGIALAASEFVRHGVRNPIQLFILL

SEQ ID NO: 749 - protein, 343 aa, unidentified
  REGION 1..343: note = Sponge metagenome
MFVPVVDKHQKPLMPTKPSRARKWIRDKKATPFWKNGVFCVRLNVDPSDRYFQEIAVGVDPGSKKEGFTVKSESHTYLNVQADAHNKVGKKLEKRSEMRRTRRSRKCPNRKNRTNRLANKARIPAGTRVRWDWKLRVLDWLSKLYPLTHICVEDIKARTIQRAKKWNQSFSPLEVGKQWFYSEIQKRWELYTLQGWETKEIRDRLGLKKSSKKLSETFDAHCVDSWCLAHHTVGGLGIPDNTTLLCISPIPIKRRELHRQQEAKGGKRTRVGGTLLGKGLVKNTLIRKPVKYGFARLAGVNAKGLFSIYSMENKRLTTSAKRSDFRVLTRLNFYYRSGVSSPE

SEQ ID NO: 750 - protein, 356 aa, unidentified
  REGION 1..356: note = Candidatus Poribacteria bacterium
MNFVPVKSKRGKKLMPTHPNKAGMLIKKGLATPYWSNGIFCIRLNYETTAYTQEICVGVDPGSKKEGFTVKSESHTYLNVQADAHNKVGKKVAKRRELRRGRRGRKCPNRKNRMNRLANKERIPAGTRARWDWKLRILDWLSKLYPVTHICVEDIKARTKQYQKKWNQSFSPLEVGKNWFYSEIQKKWELFTLQGYETKELRDRLGLKKSKKKMSESFDAHCVDSWVLAYHTIGGEPIVDNTDIFCISPLPIQRRNLHREVPKKDGIRTRYGGTRFLGTRKNMLVKHIKHGILRVTGHQKGGLTLSNIENAKQVVLSAKLDTCKILTRLNFRYKQIVSEQPKVEQGELALQLTLDI

SEQ ID NO: 751 - protein, 351 aa, unidentified; identical to SEQ ID NO: 180
  REGION 1..351: note = Oscillatoriales cyanobacterium

SEQ ID NO: 752 - protein, 411 aa, Anabaena sp.; identical to SEQ ID NO: 45

SEQ ID NO: 753 - protein, 343 aa, unidentified
  REGION 1..343: note = Sponge metagenome
MNFVPVKSKDGERLMPTTPTRAGMMIKCGDATPYWDQGVFCIRLNREPSTRFKQKIVVGVDPGSKKEGFTVKSESHTYLNIQADAHNNVGQKVAKRRELRRSRRSRKCPNRKNRTNRMANKERVPAGTRARWDWKLRILEWLSKLYPVTCVCVEDIRARSKQSQKKWNTSFSPLEVGKQWFYAEIEKRWKLFTFQGWETKEIRDRLGLKKSAKKLSETFEAHCVDSWCLAYHTVGGSDIPDNTALMCISPIPIKRRELHRQQEAKGGKRTRVGGTVLGQGLVKNTLIRHVKYGLTRLAGVNAKGLFSIYSMENKRLTTSAKRSDFRVLTRLNFYYRSGHSSPT

SEQ ID NO: 754 - protein, 395 aa, Coleofasciculus sp.
MLRVPVLSKSGKPLMPTKPSRARRWLKDGKAKVIHTDLECFAIQLTFETQENTQPIAVGIDPGKHYSGIGVQSRLVTLWMGHLVLPFKTVKERMELRRVMRRARRGRRINRKLPYDRRCHRQRRFNNRRQNKLPPSIRANRQLELRVVKELFNLFPISAIHYELVMADVDRTSGRKSAKSGVGFSPVMVGQKQMLNWLRELARVTTHNGWQRDGNGTSQLRQWLGLAKDKKNKDQQTPATHAVDGVTLAAFEFTRWREWHSDNAKYGNWQGSVEVTPAPFAIIRRPPISRRQLHLCVHSIGGKRRKYGGTVTRHVETRHGASLRKGDKVIAEKAGKTYVGWCSGDTKTQVSVSDANWKRLGQFTAKKVQLLQRSTGLIVVPSPGLSNLATLSSEV

SEQ ID NO: 755 - protein, 369 aa, Planktothrix sp.
MRVPVLSASGQPLMPTKPSRARRWLKAAKAKVVYNDLGIFQVQLIECPKGERTQPIAVGIDPGKLYTGIGVGSAKFTLWLAHLQLPFKTVKERMEQRRMMRRGRRGRRIDRKISFDKRAHRQKRFDNRRQCKIPPSIRANRELELRVISELSSIYPPTDVVYEIVKAAGDKGFSPVMVGQKWQVKNLEKYGKVKQCEGWQTANTRCFLKLEKQKHSKGDAIPATHAVDGVALACQAFIRYGIVDRQTMGWIGEVRVTPAPFTVIRRPPICRRQLHLMIPSKGGIRRKYGGTVTRHGFRKGDLAIATQGSKTYQGWVSGDTEKQVSVSDRNWKRLGQFSKNKVRLVQRSTGLIVLPNRKLSNLMASNHQI

SEQ ID NO: 756 - protein, 381 aa, Coleofasciculus sp.; identical to SEQ ID NO: 504

SEQ ID NO: 757 - protein, 352 aa, unidentified
  REGION 1..352: note = Candidatus Poribacteria bacterium
MFVPVVDKNQNTLMPTKPSRARKWIKSGKATPFWKNGIFCVRLNVDASDTELQDIAVGVDPGSKKEGFTVKSKAHTYLNVQTDAHKDIGKKVEKRRELRRSRRSRKCPDRKNKTNRLANKERIPAGTRARWDWKLRILEWLSKLYPVSKVIVEDIKARTKPDKDRWNQSFSPLEVGKKWFVRELINRFGVGNVLKYEGTWTYARRNALGLEKLKDKLSDSFYAHCVDSWVMAHSVVNGDSKKAMSMKPDNTEVFCISPIPIARRNLHREQPKKGGIRSRYGGTILKDGLVKNTLVKHVKYGLTRLAGINAKGLFSIYSLDGKRLTTGAKQSDFKVLTKLNFQYSRSGHSSQA

SEQ ID NO: 758 - protein, 352 aa, Scytonema sp.; identical to SEQ ID NO: 35

SEQ ID NO: 759 - protein, 333 aa, Microcystis sp.
MARVPVISKDGKPLMPTKPSRARRWIKEGKAIGKFNDLDIFYVQLTDEPSDSKTQPIAIGIDPGKLFSGIGVQSSLFTLWKAHLELPFKRVKERMDNRCLMRRGRRGRRINRQLPFNLRAHRQKRFLNRRQGKLAPSIRANRQLELRVVSELTKIYPITDIYFEYIKADVDLTSGRKGAKSGKGFSPVMVGQKWAIEQLSQLATVHTRFGWQTSNLRKHLRLEKSKNKAEQSPESHANDGIALACFQFLDYLPFHTSNGHGYDWKGYVKVTNAPFAVIKRPPVSRRQLHLMVFSKGGKRRKYGGSTTRHGFRKGDLVSSPKGIGYVSGDTEKQ

SEQ ID NO: 760 - protein, 373 aa, Nostoc sp.
MRVPVLSPSGKPLMPTKASRARRWLKEGKARVVYNDLGIFQIQLIRCPRTTNTQPIAVGIDPGKLYTGIGVQSAKFTLWLAHLQLPFKTVRGRMEQRAMMRRGRRGRRINRSLPYDQRAHRQKRFDNRRQCKIPPSIRANRELELRVLGELSLIYPISDVAYEIVKARGNKGFSPVMVGQKWQLENVEGYGKVNQLQGWQTANIRQQLGLHKQKHSKSDAIPATHAVDGVALACSTFIQYGMIDRQTMGWKGEVKITPAPFTVIRRPPVSRRQLHLMVPAKSGVRRKYGGTMTRHGFRKGDYVEATQSNKTYRGWVSGDTEKQVSVSDQNWRRLGQFSKNKIRLIRRSSGLIITATKVVSPVEMLHASLPSQF

SEQ ID NO: 761 - protein, 172 aa, unidentified
  REGION 1..172: note = Oscillatoriales cyanobacterium
MFVPVVSSENRLLMPTTPSRAKRWIESGKATPFWRKGVFCVRLNREPSNYNYQPIAVGIDPGSKREGFTVKSKSHTYLNIQTHAVDWVKDHVEVRRNMRRSRRFRKTPCRQNRKNRLVNKTRIPPSTKARWQWKLRIVNWLTSMFPVSAFVVEDIKARTWETDASGTYRLVL

SEQ ID NO: 762 - protein, 344 aa, Microcoleus sp.
MFVPVVNSQNRPLMPTTPSRAKRWMRSGKATPFWKKGVFCVRLNVEPSNHNYQPITVGIDPGSKREGFTVKSKSHTYLNIQTHAVDWVKDRVEVRRNMRRSRRFRNTPCRQNRANRLVNKNRIPPSTKSRWHWKLRIVNWLTLMFPISTFVVEDIKARKRKNGRKWNVSFSPLEVGKHWFYDQLRKIAHLEIRSGNDTYELRQNLGLKKSKQKLSNKFEAHCVDSWVLANWYAGGHIQPDNSSLIEIVPLEFHRRQLHRLQHSTGHIRSRYGGTLSVGFKRGSIVKHRKYGFCYVGGWQESPTKKDPYRKTISLHDLKTGKRLTQNASPTDCKFLSYNSWRIAN

SEQ ID NO: 763 - protein, 408 aa, unidentified
  REGION 1..408: note = Ga0315279_10000292
LATTTEGLQELQDTPQVLNYSEEPLNSMSLENATNSSDNSIPFNHFGCGYDNKYVGSMSPNRIFVLSESGNPLTPCKPSKARKLLKGKVAKPVWNKFGLFGIQMLIETRKEVPKFILGCDFGTKFEGYSIVSEKENNLNVMWKLPDKKTIVRKLKERRQLRRARRFRDCRRRECRFDNRKRDGFIAPSQFVIVNSRLKCMGEIFKYYPINKVAIEDVKFNHRDNRWGKNFSTVEIGKKTIKDFLVNEVGRENYLIFNGFETKDLREKKGLKKSTNKSAEHFYSHCIDSFVIASEIVNNPTHTDNILVVDDTYRPKRRRLHDTQFSKDGIRERYSTGNFKGIRKGTICEFGQIVGGTKNNVWIRNLENKRIGKVSTKISWLSHKFKVAIHPPIEIGGLFATEGILWKNL

SEQ ID NO: 764 - protein, 379 aa, Crocosphaera sp.
MLRVPVLSPDGTPLMPTKASRVRRWISDGKAVGKFNDLGQFYVQLLVKSSDTKTQSVSVGIDPGKHFSGIGVQSSKYTLFTAHLELPFKKVRERMNNRRMMRRGRRGRRINRKLPFHLRAHRQKRFSNRKQGKLPPSIKANRQLELRVIQQLCKVFPITDIYFEYVKADVDLTSGRKGAKSGKGFSAVMVGQKWMLKQLEKLGNVHTIYGWQTSNLRKHLRLDKSKNKSKQTASSHAVDGVTLACYQFLEYKAHCSGNNHGPIWQGNVTITACQFMVIKRPPISRRQLHLMLPIKGGKRRKYGGTVTRHNIRKGDFVKAIKAGKVFYGWCSGDTAKQVSVSNFDWKRLGQFTASKVVLLQRSTGLICKQEADFVGATVC

SEQ ID NO: 765 - protein, 356 aa, unidentified; identical to SEQ ID NO: 750
  REGION 1..356: note = Sponge metagenome

SEQ ID NO: 766 - protein, 334 aa, unidentified
  REGION 1..334: note = Candidatus Poribacteria bacterium
MYVPVKSKEGKQLMPTTPPVARHLIKGGKATPYWSNGIFCIRLNYETSEYTQEIAVGVDPGSKKEGFTVKSMSHTYLNVQADAHKDVGKKVEKRSELRKGRRSRKCPNRKNRTNRLANKERVPAGTRARWDWKLRILDWLSKLYPITHVCVEDIKARTIKKSKKWNTSFSPLEVGKSWFYSELQKCWQLLTLQGWETKEIRDRLGLKKSSQKLAETFDAHCVDSWCLAYHVVSGDSIPDNLDIFCISPIPIRRRELHRQNPQKGGKRPRYGGTMCLGTVKNTLVKHVKHRFLRVTGYDTRGGINLSEIASSKRIVRGAKSESFRILTKLNFQYR

SEQ ID NO: 767 - protein, 364 aa, Mastigocladus sp.; identical to SEQ ID NO: 276

SEQ ID NO: 768 - protein, 371 aa, Dolichospermum sp.; identical to SEQ ID NO: 156

SEQ ID NO: 769 - protein, 348 aa, unidentified; identical to SEQ ID NO: 190
  REGION 1..348: note = fermentation metagenome

SEQ ID NO: 770 - protein, 366 aa, Moorea sp.; identical to SEQ ID NO: 476

SEQ ID NO: 771 - protein, 399 aa, unidentified
  REGION 1..399: note = Ga0373628_0056463
MSKQETRVAKFVAKHGRPKATEPTGRGSLKDVAGAPLARNPSVGQSRSGKLPCPKDRSSGGNARYVPVVSSTGTPLSPCHPARARELVRKGKALRRFSKQLFYIRLAEREAGVVQETVLGIDPGSKKEGFSVLSAGHTYLNVQTDAVTHVKATIECRRNMRRGRRFRKTPCRQNRQNRERGGLAPSTKARWQWKLNVAKWLCKLFPIKVFVVEDIKAETREGKRRWNKSFSPLEVGKKWFYAELEKLGKVVLRQGFETCELRKNLGLEKVKNKLSHNFHAHCVDSWVLANSWVGGLLVPENKQVFLLSQPKFHRRQLHALQPAKGGERRNYGGTRSLGFKRGALVLHPKYGLCYIGGTSKGLISVHALDTGHRISRNIKITDCKFLTFNTWKGGSSSPA

SEQ ID NO: 772 - protein, 334 aa, unidentified; identical to SEQ ID NO: 766
  REGION 1..334: note = Candidatus Poribacteria bacterium

SEQ ID NO: 773 - protein, 402 aa, Scytonema sp.; identical to SEQ ID NO: 606

SEQ ID NO: 774 - protein, 338 aa, Microcystis sp.; identical to SEQ ID NO: 626

SEQ ID NO: 775 - protein, 355 aa, unidentified
  REGION 1..355: note = Candidatus Methanoculleus thermohydrogenotrophicum
MRVPVLDTNRRPLTPTTPARARLLLKQGKAKPYWNKPGIFCIILTYAVEPDNQPLVVGLDPDSSFEGWSVVGTRETVANGMLEAPKHVKKAIETRRTLRRARRHRKCWRRPARFDNRLSGRRLLPPSTFARWNTRIRILDQLQTILPITDVVVEDVFAVAKKNCRRWNENFSPLEVEKQWFYQAIRDRGLGLHLRAGYERKELRERFGLKKTQQKSKPVFAAHAVDAWVIADDVPGAERPAKQGLYYWTPIRFFRRQLHRLQPAKGGIRKPYGGTRSPGFTRGTLVRHVKHELTYIGGTLKGKMSLPNAVTGGWVTQTAKVEDCMILTRIARRTEWYAGMGRRHSSQAFRPGSPA

SEQ ID NO: 776 - protein, 342 aa, unidentified
  REGION 1..342: note = Candidatus Poribacteria bacterium
MFVPVTSKIGKTLMPTHANKAGMLIKKGLATPYWSNGIFSIRLNYATEDEYTQEIVVGVDPGNKKEGFTVKCESHTYLNVQADAHNKVGKKVAKRRELRRGRRSRKCPNRKNRPNRLANKERIPAGTRARWDWKLRILVWLSKLYPITHVCIEDIKARTKQYQKKWNTSFSPLEVGKKWFYTEVQKRWELLTLRGWKTKEIRDRLGLKKASKKLAETFDAHCVDSWCLAYHTVGGSDIPDNTDLICIAPIPIRRRELHRQNPQKGGKRLRYGGTVLGNGLVKNTLVRHVKYGITRLSGVNAKGLFAIYSLDGKRLTTGAKRSSFKVLTRLNFNYWSGVSSLR

SEQ ID NO: 777 - protein, 344 aa, unidentified
  REGION 1..344: note = Oscillatoriales cyanobacterium
MFVPVVDSENRPLMPTTSSRAKRWMCSGKATPFWRKGVFCVRLNVEPSNTDRQPIAIGIDPGSKREGFTVKSKSHTYLNIQTHAIDWVKDHVEVRRNMRRARRFRRSPCRQNRANRLVNKNRIPPSTKARWQWKLRIVNWLTLMFPISTIVVEDVKARTWKNGRKWNVSFSPLEVGKHWFYSEVIKIAHLEIKSGNDTYNLRQELGLKKSKQKLSNKFEAHCVDSWVLANWYAGGHTQPDNTKLIEVIPLEFHRRQLHRLQHSTGHIRPRYGGTLSVGFKRGSIVKHPKYGFCYVGGWQEFPTKKDPYRKTISLHDLKTGKRLCQNAMPIDCKFLSYNSWRIAN

SEQ ID NO: 778 - protein, 355 aa, unidentified
  REGION 1..355: note = Ga0255812_10666830
MLVPVLDTNRNPLMPVKPALARLLLTQKKASAYWNKLGIFCIILHKVVDNPSLQQLVVGIDPGSKWEGWSVVGTQDTILNGMSEAVTHVKDAVEVRRNMRRARRHRKLWRREARFNNRLRNKEALPPSTMARWQAKLRILIQIKKILPISDVVIEDVRAETRKGCERWNSNFSPIEQGKQWLYKEIEQLGLNLHLRRGYETKELREHFGLKKTSQKDKQTFSSHAVDAWVMAASISGAISPTYQGLLYWIPIRFHRRQLHRFEPSKGGVRRPYGGTRSMGLSRGTLVKHIKFGRCYIGGTLKGRVSLHSHRTGKRVTQGAKIQDCRILTRISWRGTLLPRINSWVSAAPAPHGVS

SEQ ID NO: 779 - protein, 351 aa, unidentified; identical to SEQ ID NO: 180
  REGION 1..351: note = Oscillatoriales cyanobacterium

SEQ ID NO: 780 - protein, 341 aa, unidentified; identical to SEQ ID NO: 347
  REGION 1..341: note = Candidatus Poribacteria bacterium

SEQ ID NO: 781 - protein, 334 aa, unidentified
  REGION 1..334: note = viral metagenome
MVRVLDENKNPLMPCSEKRARKLLERKEAKPYWYKGVFCIVLQRPPKTTYKQEVVVGIDPGSKFEGLTVKSEAHTLLNIQTEAKVDVKKKMETRTALRRSRRSRKLRYRPNRPNRGVGKRLPPSTKSRWQYKLSLLNWLGRMYPVTHVVVEDISAVTKQGKSRWNKTFSPLQVGKNYFRDEVEKMGVEYSEYAGYETYEFRNSYGLKKNSNKSKKDFYTHCVDSWVLANEVVGGHTKVDNERVLFLSPIKRYRRQLHRQNPQKGGTRPPYGGTRSLGLERCTLVKHPKYGLSLVGGTSKGRVSLHSLQTNKRLTQLAKIEYLTILTNLKWNIQT

SEQ ID NO: 782 - protein, 392 aa, Okeania sp.
MTRVPVQNPDGTPAMPTKASRARRWVRDGKATGHWNDPGIYYIRLVTEPSGRSVQKVAVGVDPGKSYTGIAVQSAKATLYLAHLLLPFQRVKERIGAAVIKKGKVIKNARGRALHRRVRRGQRINRKIPFEQRAHRQKRFDNRRRDSKIAPSIRAAREMELRIVTELSKIYPVASIVDQVIKADVDLTSGRRGARSGQGFSTVMVGQKWAIKQLQSIATVKTVLGWQKNGNGTSQIRKHLELTKIKDKKAQTPESHAVDGIALAATEFIRFGLVPKIGYDLHTWIGSITVTSAPFRIITRPEYFRRALHFDNADKGGKRKRKGGTITPFDVRCGDRVMATKSGETVIGWVGGYTQTAKSKNISVYDHNWKRLGQYAPSKVWLIRRSNKLCVA

SEQ ID NO: 783 - protein, 329 aa, unidentified
  REGION 1..329: note = Ga0373629_0010383
MFVPVIGKDRKPLMPTTPWRAAIWVKKGKATPFWSNGVFCVRLNVEPSDTKKQDVVIGIDTGSKREAFTIKSETYTYLNILVDAVTWVKDAVERRRNARRDRRQRKTPYRQIRKNRARGGIPPSTRARWQLKLRVVNRLQRVFPITDFVVEDIKAKSLGKRKWDVSFSPLEVGKQWFYDELRKLGNLETRRGFETKELRDILGLKKTGNKMSESFNAHNVDSWVLANWRVGGHTVPDNTTIKRMIPLQFHRRQLHNFQFEIGGKRRRQGGTISLGFKKGSLVKHPKHRLCYVGGNLGGRLSLHSLQTGKRLCQKAKVKDIQFLTYSSFR

SEQ ID NO: 784 - protein, 330 aa, Synechococcus sp.
  VARIANT 330: note = Xaa can be any naturally occurring amino acid
MFVPVVDRNQQPLMPTTPARARRWIKAGKATPFWKKGVFCVRLNVEPSDRKVQPIAVGIDPGSKKEGWSVKSAAHTYLNIQADAVTWVREHVEQRRNMRRSRRYRKTPCRQPRSNRARGGLPPSTKARWQWKLRLARWLVRLFPVTTFVVEDIQAKTKGQRRWDTSFSPLEVGKRWFREQLSKLGQVLTCSGWETKQMRDALTLKKTSKKTAEVFETHCVDAWVLANSVTGGHKLPDNKRMLFLVPLRFHRRQLHRLQPDKKGRRTPYGGTLSLGCKRGSLVRHRRWGLAFVGGSSGNKLSLHRLEDGKRLTQNARKADVRHLSFCSWRX

SEQ ID NO: 785 - protein, 343 aa, unidentified
  REGION 1..343: note = Candidatus Poribacteria bacterium
MFVSVKSKSGKKLMPTHPNKAGMLIKKGLATPYWSNGIFCIRLNYVTEDEYTQDIVVGVDPGSKKEGFTVKSESHTYLNIQADAHNKVGKKVAKRSELRRSRRSRKCPNRRNRKNRNAGKEKIPAGTRARWDWKLRILSWLSKLYPVTHVCVEDIKAPTIERARKWNTSFSPLEVGKKWFYDEIRKRWSLLTLQGYQTKEIRDRLGLKKSSKKLLESFDAHCVDSWCLAYHAVGGESIPDYTDIFCISPIKIKRRELHRQKESKGRIRSRQGGTVLGNGLIKNTLIKHVRYGITRLAGVNAKGLFSVYNLEGNKRITTGAKRSDFRVLTRLNFNYRSGYSSQA

SEQ ID NO: 786 - protein, 366 aa, Moorea sp.; identical to SEQ ID NO: 52

SEQ ID NO: 787 - protein, 341 aa, unidentified
  REGION 1..341: note = Candidatus Poribacteria bacterium
MFVPVIDKNQKPLMPTKPSRARRWIKQGKATPFFNKGVFCVRLNIDPSDRQLDDIVVGVDPGSQKEAFTIKSEHHTYLNVQADAVTHVSKRIKSRREQRRNRRFRKRPYRQHRINRTQGGIPPSTRARWELKLRVLNWLSKIYPISHVVVEDIKAWTRKGSRQWNRSFSPLEVGKQWFYDEIERRWILFIKAGYETKQLRDTLGLKKSSNKKSDSFEAHCVDSWVLANCIVKGHDVPDNTDIVYIIPYQFHRRQLHRLQPSKDGKRHRYGGTISMGVKRGRWIKHSEHGICFVGGFQKQRLSLHSLEDGKRITLSAKLEDLTMLCFSGWRTRSAVGLLGIA

SEQ ID NO: 788 - protein, 379 aa, Crocosphaera sp.
MLRVPVLSPDGTPLMPTKASRVRRWISDGKAVGKFNDLGQFYVQLLVKSSDSKTQPISCGIDPGKLFSGIGVQSAKSTLFTAHLELPFKKVRERMDNRRMMRRGRRGRRINRKLPFHLRAHRQKRFSNRKQSKLPPSIKANRQLELRVIQELCKVFPITDIYFEYVKADVDLTSGRKGAKSGKGFSAVMVGQKWMLKQLEKLGNVHTIYGWQTSNLRKHLRLDKSKNKSKQTASSHAVDGVTLACYQFLEYKAHCSGNNHGHIWQGNVTITACQFMVIKRPPISRRQLHLMLPGKGGKRRKYGGTVTRHNIRKGDFVKAIKAGKVFYGWCSGDTAKHVSVSNFDWKRLGQFTASKVVLLQRSTGLICKQEADFVGATVC

SEQ ID NO: 789 - protein, 337 aa, Microcystis sp.
MARVPVISKDGKPLMPTKPSRARRWIKEGKAIGKFNDLDIFYVQLTDEPSDNKTQPIAIGIDPGKLFSGIGVQSSLFTLWKTHLELPFNLRAHRQKRFSNRKQGKLAPSIKANRQLELRVVSELTKIYPITDIYFEYIKADVDLTSGRKGAKSGKGFSSVMVGQKWTIEQLSKLATVHTRFGWQTSNLRKHLRLEKSKNKAEQSPESHANDGIALACFQFLDYLPFHNSNSHGYDWKGYVKVTNAPFAVIKRPPISRRQLHLMVFSKGGKRRKYGGSTTRHGFRKGDLVSSPKGIGYVSGDTEKQLSVSDTNGQRLGQIAVSKIQLIRRSNGLIVSR

SEQ ID NO: 790 - protein, 361 aa, unidentified
  REGION 1..361: note = Candidatus Poribacteria bacterium
MFVPVKSRDGQQLMPMHAARARKLVRRGEATPYWDNGIYCIRLNKEPSHRDTQEIVVGVDPGSKKEGFTVKSEKHTYLNVQADAHDKVGKKVEKRRELRRSRRSRKCPNRKNRTNRLANRARIPAGTRARWDWKLRILQWLSRLYPITHVCVEDIKARTIERAKKWNSSFSPLEVGKQWFYTEIQRRWHLLTLQGWETKEIRDRLGLKKSSDKMSQTFDAHCVDSWCLAYHTVGGGSIPENTDIFCIAPIPIKRRSLHREQESKGGQRNRYGGTLLGNGLIKNTLIKHVKYGLTRLAGVNAKGLFSIYNLEGNQRLTTSAKRSDFRVLKRLNFNYKSGHSSPGSPPVTGKGAKAWGLLPED

SEQ ID NO: 791 - protein, 344 aa, unidentified
  REGION 1..344: note = metagenomes
MQYVAVVSSTGKALMPCHPARARELVTKGRGVRRFDRGLFYVKLLDRADGNVQQIAVGIDPGSKREAFTLKSAKHTFLNIQTETIDWVKDAEKTSTTLRRSRRGRKIPYRECRPLRSRNKLFLPPSTKARWQWKLRVCRWVNRYYPIHTFIVEDVKATTHKGENSPWNQHFSPLQVGKEWFYYELSRIAPVETVQGFETAQERKRLSLQKSKNKLSDTFEAHCVDSWTIANMKTGGHTQPDHKAIHYLIPLRFHRRQLHLLQPAQGNLRKRYGGTLSMGFKRGSWVKHPKYGVCYVGGTSNGRISLHTLDTGKRLCQNAKPEDLTFLCTASWRIRKGNAVSSAA

SEQ ID NO: 792 - protein, 371 aa, Dolichospermum sp.
MRVPVISVDNTPLMPTKPSRARRWIKDGKAIGKFDKLGIFYVQLLAEPSNTETQEIVIGLDPGKLFSGIAVQSKKFTLQMLHLVLPFKTVKDRMEQRSMMRLNRRGRRINRKLSFNVRNHRQARLDNRRGSKLPPSIRANKDLEYRVISLLLQLYPIKTIVIEEVEARGNKGFSPVMVGQRYQISRLSKLTNVVLKKGWETSNLRKHLGLHKEKSDKSLQIPETHAVDAVTLACSEFVKYQTWEGAKNHGASWVGGVDVTESQFTIVRRPPISRRQLHLMNFSQGGDRRKYGGSTTRHGFRKGDFVKASQGNKTFLGWVSGDTEKQVSVSDANWKRLGQCTVKKVKLIRRSTGLIVTAVKTARVASLSALK

SEQ ID NO: 793 - protein, 361 aa, unidentified
  REGION 1..361: note = Cyanobacteria bacterium sp.
MRVPVISSDDQPLMPTKPSRARGWVREGKAKGFFKDLSQYCVQLLEEPTGTDTQSIAVGVDPGKKYSGLGVQSANYTLWKGHLILPFETVKKRMEQPRMMRRGRRGRRINRKLPYKQRAHRQKRFNHRRGHKLPASIRANRQLEYRVVKELTKVYPICAIYYEDVEAKGDKAFTPVMVGEKFMLQWLEKLAPTHTKLGWETASLRRDLKLEKSRNQGESTPASHAVDGIALASHSFRGMEKINGKNYRGQVWQGEVNLTESPFTVLRRPPVSRRQLHLMVEPLGGVRRKYGGTVTRHGFCKGDYVQASRKDQAFFGWVSGDTKSQVSVSNANWKRLGQFSTNKIRLLKHSTNLVTTAKAVI

SEQ ID NO: 794 - protein, 329 aa, Moorea sp.; identical to SEQ ID NO: 57

SEQ ID NO: 795 - protein, 361 aa, unidentified
  REGION 1..361: note = Cyanobacteria bacterium sp.
MRVPVISSDEQPLMPTKPSRARGWVREGKAKGFFKDLSQYCVQLLEEPTGTDTQSIAVGVDPGKKYSGLGVQSANYTLWKGHLILPFETVKKRMEQPRMMRRGRRGRRINRKLPYKQRAHRQKRFNHRRGHKLPASIRANRQLEYRVVKELTKVYPICAIYYEDVEAKGDKAFTPVMVGEKFMLQWLEKLAPTHTKLGWETASLRRDLKLEKSRNQGESTPASHAVDGIALASHSFRGMEKINGKNYRGQVWQGEVNLTESPFTVLRRPPVSRRQLHLMVEPLGGVRRKYGGTVTRHGFCKGDYVQASRKDQAFFGWVSGDTKSQVSVSNANWKRLGQFSTNKIRLLKHSTNLVTTAKAVI

SEQ ID NO: 796 - protein, 371 aa, Mastigocladopsis sp.; identical to SEQ ID NO: 138

SEQ ID NO: 797 - protein, 365 aa, Microcystis sp.; identical to SEQ ID NO: 275

SEQ ID NO: 798 - protein, 373 aa, Microcystis sp.
MARVPVISKDGKPLMPTKPSRARRWIKEGKAIGKFNDLDIFYVQLTDEPSDNKTQPIAIGIDPGKLFSGIGVQSSLFTLWKAHLELPFKRVKERMDNRRLMRKGRRGRRINRQLSFDLRAHRQKRFSNRKQGKLAPSIRANRQPFDVAQGQLELRVVSELTKIYPITDIYFEYIKADIDLTSGRKGAKSGKGFSSVMVGQKWAIEQLSQLATVHTRFGWQTSNLRKYLRLEKSKNKAEQSPESHANDGIALVCFQFLDYWPFQTYNSHGYDWKGSVEVTNASFAVIKRPPISRRQLHLMVFSKGGKRLKYGGSTTRHGFRKGDLVSSPKGIGYISGDTEKQLSVSDTNGQRLGQIAVSKIQLIRRSNGLIVSH

SEQ ID NO: 799 - protein, 366 aa, Moorea sp.
MLRVPVISPDGKPLMPTKASRARRWLNQGLAIVYPNDLNVFAVQLVNQPSSYQTQDIAIGIDPGKSFSGIAVQSNKATLWTGHLVLPYKKVRVGMDTRRMMRSRSVGFAERTRRSRRINRKIPYSQRSHRQKRFSNRRNKKVPPSIRANRQLENRVVRELSLLYPVSAIVCEIVKANGNKGFSPVMVGQYWAISQLEKIAPVTQKQGWETALKREALGLIKDKIDKSRQTVNTHAVDGIALAATHFYRRKNYYHRNGKLSVPKNCEVTNAVFSVIRRAPISRRQLHLLQFSKGAKRRKYGGTTTSHGFRKGDYVEAVKAGKAYRGWVSGETARQVSVSDINWKRIGQFTARKVRLLKRSTGLIVNH

SEQ ID NO: 800 - protein, 380 aa, Calothrix sp.; identical to SEQ ID NO: 418

SEQ ID NO: 801 - protein, 401 aa, unidentified
  REGION 1..401: note = Ga0315284_10005110
VAKISNGRLKATELSGHGSPKDVVGASQAHNLSDSQSRWGVSTCFGNSSRLTATKTVSVPVIDIDQKPQMPTTSSRARRWIKEGKATGFWKKGIFCVRLNQEPSNRNKQVIAIGIDPGSKKEGFTVKSEAHTYLNIQADAVTWVKDGVEVRRNMRRARRFRKTPCRACRPNRSKKSWLPPSTKARWGWKLRICNWLMKMYPIDTFVVEDIKAKTMGKRKWDRSFSPLEVGKNWFYEELNKLGHLETKQGYETKELRDQLGLKKTGKRLDSIFSSHCVDSWVLANDYVGGHLKPDNTNLICITPLQFHRRQLHALQPTKNGIRRDYGSTRSLGFKRGSLVKHKKYGRVSVGGTSNNRISLHSIETGKRLAQNIKPVDCKFLTYNIWRMAIPPTTKVVGFLAI

SEQ ID NO: 802 - protein, 353 aa, Kouleothrix sp.
MQPYVPVISASGKRLMPTTNRTADRLVAKGRAVRRFDRGLFFIQLTDRVDGYTQPIALGIDPGSRKEAVTVQSAQHTFLNVQADAVTWVKQHVETRRNMRRVRRYRKTPCRANRKNRARGSIPPSTKARWGLKVRIVRWLARYYPITIIVIEDVAAVTLKGRRRWNQSFSPLEVGKAWCYDALEQIAPVLPIPGPQTKALREQAGLKKSRNKLSDAWDVHCVDSFVLASYAVGGPSKPSHTHMLYLIPLRFHRRQLHRFQPEKGGIRKPYGGTISMGMKRGSWVQHPKYGLTYIGGTLNGRISLHDMQTGKRLTQNVKVEDCQFLCTASWRIRAKAGSSMALLPRVKLVGCRA

SEQ ID NO: 803 - protein, 351 aa, unidentified; identical to SEQ ID NO: 180
  REGION 1..351: note = Oscillatoriales cyanobacterium

SEQ ID NO: 804 - protein, 358 aa, Moorea sp.; identical to SEQ ID NO: 62

SEQ ID NO: 805 - protein, 365 aa, Nostoc sp.
MRIPVVDQNHKPLMPTTPGRARKWVESGKAVKRWSDSGQFYVQLTGEPSGRATQDIVIGIDPGKSYSGIGVQSAKFTLYTAHLVLPFKTVRERMDARRLMRRGRRGRKINRKVAFAQRAHRQKRFSNRRQCKLAPSIRANRQLELRIVAELCKIYPVTETRYEYVRADVDLTSGRKKAKSGKGFSPVMVGQAWMLAQLAKFTPVVKVEGYQTASTRKHLGLVKNKSDKSKAEFNTHTVDGVAIAATHFVEYRQYHRKGEDGAHWVGSVAITPAQFFVIRRPPYSRRQLHLMLPAKGGVRRKYGGTTTGHGFRKGDLVNSPKGVGYVSGDTQKQISVSDASWRRLGQIAASKIQLIRRSNGLVVVC

SEQ ID NO: 806 - protein, 391 aa, Okeania sp.
MIRVPVQNPDGSPAMPTKASRARRWVKSGKATEHWNDIGLYYVRLVTEPSGRKTQKIAVGCDPGQNYTGIAVQSAKFTLFTAHLVLPYERVKERLGSAVIKQGKVIKNVRNRALQRRVRRGRRINIKVPFSLRAHRQKRFNNRTKKGKIAPSIRASREMEIRIITEISQVFPMSKIVYELVNADVDLTSGRKRARSGQGFSPVMVGQYWCVEQLKSIAPVKTVYGWQKNNNGTSQIRRYLKLEKIKDKKAQVRESHAVDGIALAASEFVRHGVTPGKKSDIWGWKGLINITPCIFRVITRPAYFRRALHFDNAEKGGIRKRKGGTITPFNVRYGDKVLAKKAGFTYIGWVGGFTDAKAKNISVYDHNWKRLGQFSPKKVQLIRRSNKLCVI

SEQ ID NO: 807 - protein, 337 aa, Pricia sp.
MFVPVVNKNNEPLMPTIPSRARRWVRSGKATPFFKKGVFCVRLNVEPSNNEKQDIAVGIDPGSKREGYTIKSESHTYLNILTETPYWVSKAVEVRRNMRKARRFRLRRRPARFNNRKGKFLAPSARARWQLKLNICKWLQKIFPATHYYAVEDIKAKSWKGAKKWNKSFSPLEVGKQWFYKELRTLGELTLKQGYETKELRDDLGLKKSSSKLADKFECHNVDSWVLANCMVGGHSRPDNKDILKIIPLRFHRRQLHVFQCAKGGVRRNHGSTRSLGFKRGSLVKHNKRGLCYVGGTSKGRISLHSLATGIRFCQNAKVQDCVFKSYSSTRSQYLSP

SEQ ID NO: 808 - protein, 351 aa, unidentified; identical to SEQ ID NO: 180
  REGION 1..351: note = Oscillatoriales cyanobacterium

SEQ ID NO: 809 - protein, 365 aa, unidentified
  REGION 1..365: note = Ga0315280_10014910
LAKGNLTPTKIGRKVIPMETNRVPVVDFEGKPLMPTTPVRARLLLKEGKAVAKRNKLGVFYIRLKTVKQPNNQLLTVGVDPGSKFEAVSVVGTKDTILNVMSEAVTWVKTVVKQRREMRRNRRNRKTRCRVCRRNRRGRTLPPSTRARGNAKLRIIEQLQKILPLQAVVVEDIKARTKLGQKRWNTNFSPLEVGKQYFYNQLERMGLKVVTKQGYETKKLRRRYHLKKTRQKSAKTFESHCIDAWVLAASETDAKQPTTKSLYYLVPLRWHRRQLHRLQPKGGVRRRYGGTQSLGLKRGTLVRHVRYGLCYVGGNPNGGFSLHSPKTGKRLTQNAERGDFKVLTRVAFRSQFLPALKSGVSLGGV

SEQ ID NO: 810 - protein, 396 aa, Microcoleus sp.
MIRVPVLSPKGKPLMPAKASRVRRWLKSGKVKVIRNDLGVFQVQLVKEPSGEQTQDIAAGIDPGKLFTGMAVQSKSVTLFLAHLNLPFKTVTKRMQGRAMMRRGRRGRRINRKVPYDQRNHRECRFDNRKGHKIPPSIRANKQLALRVIQELSKIYPFTHVLVEVIKARGDKGFSPAMVGQYWQIEQLEQAGYTVHTQEGWHTSNLRKYLGLPKSKNKAEESPAAHAVDGICLAASRFIRYRQIKGRSGTFLGSITVTPCQFAVISRSPICRRQLHLMIPGKGGKRRHYGGTLTRHGLRKGDYVKAEKAGITYYGYVSGDTKTQVSVSDAKWKRIGRFTTKKVQLLQRNTGLVSTVGLSNLALSEVEGRGLTSIPLRPTSLRSESHEVKRWCFLSN

SEQ ID NO: 811 - protein, 344 aa, unidentified; identical to SEQ ID NO: 474
  REGION 1..344: note = Oscillatoriales cyanobacterium

SEQ ID NO: 812 - protein, 350 aa, unidentified
  REGION 1..350: note = Ga0315280_10062518
MNVPVVSAIGTPLMSCRPAKARKLLARNLAEKCWNRLGQFYLRLRFDPKSEPNRGQHVCLAVDTGSRWDGMAVVTEKEVLTTAELVLPSRIAGKIETRRRMRRARRYRKTPRRAKRFNNRRRPQGWIAPSQKAKVDFRIKIVDELRRLYPINRFAVEDVRFDHYRKRWGKHFSTVEIGKTKFYQHLRSLGHLSLYTGIETAEWRKKLGLPKNSRKSALKWDAHTSDAIAMGCAETGCAVPAPPEFWVWKRFQYPRRQLHRFKPGRGGVRRRYGGSLSIQPFKKADVVVWHGRLVRVGGFMGRHISIHAFTLKNERVTQNARPEDCVRLFNQRIFSQFLPRINLWVSLEGS

SEQ ID NO: 813 - protein, 390 aa, unidentified
  REGION 1..390: note = Ga0315277_10071052
MQKLKELQDTPQVLNTSGESLNPMSESSKLLHHGGCGCNRKGSMSAHSVFVLHKDGTPLTPTKPTKARKLMVGNVAKPVWNKFGQFGIQMLVDTRKETPNTSLGIDNGTRFEGYSVVCGNENSFNAMWKLPDKKKIVQKLVERRQLRRARRFRNCRRRACRFDNRKKDGFIAPSQLVIVNSRLKAINEFFRTYPINLVGIEDVRFNHARFRNGKNFSTMEIGKTRIYDFISQYAELHKYEGHETQKLRKLYGYRKVRIKSKEHFTSHCCDSLTLAVNLTTNSKIDVGYFCIADDSYRPVRRKLHDAQFSKGHIRHPYSQGNFNCVKKGTISSHGLIGGGTGNGFRVYDWEGVRTFKIISKMIWMSKRFFVKQEGGRAIPLSNKLDSPLAR

SEQ ID NO: 814 - protein, 365 aa, Microcystis sp.; identical to SEQ ID NO: 303

SEQ ID NO: 815 - protein, 358 aa, Lyngbya sp.; identical to SEQ ID NO: 62

SEQ ID NO: 816 - protein, 365 aa, Microcystis sp.
MERVPVISKDGKPLMPTKPSRARRWIKEGKAIGKFNDLDIFYVQLTDEPSDNKTQPIAIGIDQGKLFSGIGVQSSLFTLWKAHLELPFKRVKERLDNRRLMRKGRRGRRINRQLPFNLRAHRQKRFSNRRQGKLAPSIRANRQLELRVVSELTKIYPITDIYFEYIKADVDLTSGRKGAKSGKGFSSVMVGQKWAIEQLSQLATVHTRFGWQTSNLRKHLRLEKSKNKAEQSPESHANDGIALACFQFLDYLPFHNSNSHGYDWKGYVKVTNAPFAIIKRPPVSRRQLHLMVFSKGGKRRKYGGSTTRHGFRKGDLVSSPKGIGYISGDTEKQLSVSDANWKRLGQIAISKIQLIRHSNGLIVSH

SEQ ID NO: 817 - protein, 344 aa, unidentified
  REGION 1..344: note = Candidatus Gracilibacteria bacterium
MQFVPVVDQNQKPLMPTTSARARRWIASGKATGFWKKGVFCVRLNVELSKRNLQRIAVGIDPGSKREGFTVKSQSHTYLNLQTYAVDWVKDAVETRRNMRRARRYRKTPCRQNRSNRLANKSRLAPSTKARWQWKLRICWWLEKMFPITCFVVEDIKARTWKNSKKWNRSFSPLEVGKEWFHQQLNRVAPVELKQGLETSELRDSLGLKKAKNKLSDKFEAHCVDSWVLANWYVGGHTQPDNTSLLIVIPLRFHRRQLHRLEHARGGVRSSYGGTMSLGFKRGSIVQHPKFGLSYLGGSSKGRISLHSILTGKRLTQNAKKEELKFLAYNSWRTAVKTRGCVRK

SEQ ID NO: 818 - protein, 365 aa, Chlorogloeopsis sp.; identical to SEQ ID NO: 320

SEQ ID NO: 819 - protein, 434 aa, Anabaena sp.
MLPQFGLYARLFVQSLVKDKTFWISWARGLKLVLENRSTWAKPLAQPLVEKTAFSAYSKDYLFVRVPVISADNKPLMPTKPSRARRWIKEGKAIGKFNKLGIFYVQLTINPSDTQTQEIVIGLDPGKMFSGVAVQSGKYTLQMLHLVLPFKTVKDRMEQRSMMRRGRRGRRINRKISFKKRSHRQARFDNRRNSKLPPSIRANKDLEYRAIKLLSEIYPVKTIVVEELEARGSKSFSPVMVGQRYQIKRLSELAKVELRKGWETSNLRKHLGLHKEKSDKSLQVPETHAVDAVTLASSEFIKYQTWEGTKSHGASWIGTVSITESQFTILRRPPISRRQLHLMIPSKGGNRRKYGGTVTRHGFRKGDYVEATQGSKIFFGWVSGDTDKQVSVSDADWKRLGQCSVKKVKLLRRSTGLIIKAVKTARVASLSALK

SEQ ID NO: 820 - protein, 429 aa, unidentified
  REGION 1..429: note = Ga0373625_0208636
MPNRKLQIKQETRVDKVGGRKAHSRPKSTELTGRGSPKDAGNTSLVSSHSVSQSRRDSTKSYSVKNNSLVGEGNFPAVPVVSKTGKPLMPTRPSRARELISKNKAVGKWRVGIFYIQLTEREDGVTQPIAVGIDPGSKREAFTVKSAKHAYLNVLADAVTWVKDAVEIRRMMRRNRRYRKTPCRANRINRAKGRLPPSTKARWQAKLRIVDILAKLYPVSSYIVEDIKAATWNNSKRWNISFSPLEIGKNWFYTELLKRGSLTTKQGYETKELRDTLGLKKTHGKMEEKFSAHNIDSWVLANSVVGGHDKPDNEAIWRLIPLRFHRRQLHRLQFSSGVRLPYGGTISCGFKRGSLVKHPKYGLCYVGGSMECKRVSLHGLDTGDRLCQNAKIGDLKMLRFNSWRFNGDTLGQQVRAGGCGHGEIVYLKT

SEQ ID NO: 821 - protein, 276 aa, Bacterium sp.
MERVAVLHKDGTPLMPCKPAKARKLLRDGRATKHWTKEGVFYIRLTWNSTKHVQDMCLGIDPGAKFDGYAVLTDQEIVTSGMAILPDIRKKVETRRMLRRNRRGRKNRRRKPRHQDTKKNGWISPTQRAKVEFRLTLINRYRRLYPITYFAVEDVRFNHYKKRWGKHFSTVEIGKTMLYTELERYGALYKFEGWQTKELRDRAGLKKSSSKDKLSFDSHAVDATVIAAEVIGYTGDFSVLSFWVFKRPNLRRRSLHLQTPQKGGVRRIHGGTWAKL

SEQ ID NO: 822 - protein, 342 aa, unidentified
  REGION 1..342: note = Candidatus Poribacteria bacterium
MFVPVTSQTGQKLMPTRANKAGVLIKKGFATPYWSNGIFCIRLNYAIEDAYTQDIVVGVDPGSKKEGFTVKSESHTYLNVQADAHRGVGKKVEKRRELRRSRRSRKCPNRKNRTNRLANRERIPVGTRARWDWKLRILDWLSKLYPLTHVCVEDIKARTIERAKKWNTSFSPLEVGKQWFYTEIRKQWQLLTLQGWETKEIRDSLGLKKSSDKMSETFDAHCVDSWCLAYHTVGGSAVPDNTDLMCVSPIPIKRRELHRQQEAKGGKRSRVGGTVLGQGLVKNTLIKHVKYGLTRLAGVNAKGLFSIYSMGNKRLTTGAKRSDFKVLTRLNFYYRSGHSSPT

SEQ ID NO: 823 - protein, 453 aa, unidentified
  REGION 1..453: note = Ga0373625_0000556
MLLINTELTMCGARVIRVDAWAKPYGASAVNNPTPISLGLQGVGMPSRNEQGKMETRVDKVGGRKAGGRSKSAESSARGGAKDVVGASQARNPSGGQPRWESTLKGSEGTSLTAGGVSPQWIPVLASIGVPLMPTRPRRARRLVESGRAVGKWKAGIYHIRMLDRDVGEVQPIAVGIDPGSKREGFTVKSERHTYLNILSDAVTDVKDRVEARRNVRRARRSRKTPCRANRENRARGGIPPSTKARWQAKLRIVNILYSLYPVKTWVVEDIKAKTRRGGKRWNISFSPLEVGKGWFYGEMMKRGELALKSGWDTKCMRDALGLVKTNGKMEERFSAHNVDSWVLAHSSVGGNGKSDNESIWRMVPLRFHRRQLHYFQPSSGGIRRAYGGTMSLGLKRGSLVRHPKWGTCYVGGNMGEKISLHQLTDGERVCRSAKKSDLKVLRFGSWRYSKVA

SEQ ID NO: 824 - protein, 307 aa, unidentified
  REGION 1..307: note = Candidatus Poribacteria bacterium
  VARIANT 307: note = Xaa can be any naturally occurring amino acid
MFVPVKTKDGQQLMPMHASRARKLVKRGEATPYWNNGIYCIRLNKEPSDRETQDICVGVDPGSKKEGFTVKSKADTYLNIQADAHTHTSKKVAKRRELRRGRRSRKCPNRKQKKHNLSHRHRIPAGTRARWDWKMRILDWLSRLYPITHVCVEDIKARTKQYQKKWNQSFSPLEVGKQWFYSEIEKRWQLSRLVGHETKNVRENLGLKKSSDKTAESFDAHCVDSWCLAYHVLGGDPIVDNTDIFCISPIPIQRRNLHREVPKKGGIRSRYGGTRCLGFTKGTLVKSMKWGLCWISGHQNGKINLTX

SEQ ID NO: 825 - protein, 410 aa, unidentified
  REGION 1..410: note = sediment metagenome
MDSTHTKPVRAGIGRLKTTEPTARSRAQYVASASQACNRYVGQSRRAKLPVLPVRAGQSPRPTSPGWVPVISSTGTPLMPCRPAYARALIRSGRAVRRWFRGIFCIKMLDRAEGIVQQVVVGVDPGSKREAMTVQSKQHTYLNVLSDAVTWVGDRVEVRGNMRRSRRFRKTPCRKNRANRNINSKRLPPSTKSRWQIKLNILKFLKKLYPISDVVVEDIKARTWKGPKKKWNKSFSPLEVGKAWFYDKVSLMGDLIKKCGYETFERRNVLGLKKTKEKLAETFGAHNVDSWVLASFETGKSSVDNKELFRVVPMQLHRRQLHRYEPETDGVRKFYGGTRSMGMRRGSVVNHTELGMVYVGGASKGKVSLHDVESGKRLTQKGSCSDVRMFYTSPWRTRFLPPAKAVDFLS

SEQ ID NO: 826 - protein, 350 aa, Coleofasciculus sp.
MQYTPVFDSQNTILMPTKTQRAIRWVESGKATPFYKRGVWCIRLNVEPSARNYQPIAVGIDPGSKREGFSVKSKAHTYLNVQTHAVDWVGDAVETRRNMRRARRFRKTPCRQNRSNRLRNHVLLPPSTKARWQWKLRICWWLVKLFRVTDYCVEDIKARTWNNGRKWNVSFSPLEVGKKWFYDQLRQIGQLEIKSGMDTKQMRDTLGLKKTKNKLADTFNAHCVDSWVLANSITGGHLQLDNTQLLTIVPLRFHRRQLHRLEHAAGHVRPRYGGTLSNGFKRGSLVKHLKYGLAYVGGYMEKPTKKNPHRQVISLHCPYTGKRLTQNAVREDLKFLSFNSWRAAFLPAHA

SEQ ID NO: 827 - protein, 368 aa, Microcoleus sp.; identical to SEQ ID NO: 262

SEQ ID NO: 828 - protein, 341 aa, unidentified; identical to SEQ ID NO: 561
  REGION 1..341: note = Candidatus Poribacteria bacterium

SEQ ID NO: 829 - protein, 344 aa, unidentified; identical to SEQ ID NO: 575
  REGION 1..344: note = Oscillatoriales cyanobacterium

SEQ ID NO: 830 - protein, 357 aa, unidentified
  REGION 1..357: note = Ga0315280_10062386
MDVPVVSKSGAALMPCKPSKARKLLKRNLAEKCWNRLGQFYLRLKFDPKSPNEGQHVCLAVDTGSRWDGMAVVTEKRVLTTAELVLPKGIAGKRGKIETRRRMRRARRYRKTPRRAKRFSNRRRPKGWIAPSQKAKVDFRTKIVDELRRLYPIDRFAVEDVRFDHPHKRWGKHFSTVEIGKTRFYEHLRSIGHLNLYAGAETAEWRKKLELPKNPRKSALKWDAHASDAIAIGCAETGCTDPTPPEFWVWKRFQYPRRQLHRLEPGKGGVRRRYGGSGSVCPFKKADVVVWRGQLVRVGGCMGKRLSLHAFTLKNERVTQKAKPTDCKRLFNQRIFSMRQIPIPPLPKGRGLLGGVR

SEQ ID NO: 831 - protein, 347 aa, unidentified
  REGION 1..347: note = wastewater metagenome
MLVPVVNKRGEPLMPCRPALARKMIAEGKATPFFKKGFFAIRLNYGSSGYKQAVLLGIDPGSKRTGMTVATEQKSVLHLQSDAPIWVKKKVETRGNLRTTRRGDCPSRLHKQNKKRNKKFVAPSSRARWGAHLRLLCVLLKIIPITDVAIEDIKAKTRKNHQPKAGAKKGQTSKNWNENFSPLEVGKKYFESEIKKLGLNLYKFAGYETFEHRKLHGYKKSTKKLSDDFSAHCVDSFSLCEMINGWQLELTSKKIYKITLLEFSTRQLHVQNPIKGGERKKYGSTRSMGLNRGTLVEHPKHGRTYVGGTRNDRISLHSQQTGKRLSQKVKVEDCKILTNQSWTNNLI

SEQ ID NO: 832 - protein, 361 aa, unidentified
  REGION 1..361: note = Cyanobacteria bacterium sp.
MRVPVISSDDQPLMPTKPSRARGWVRERKAKGFFKDLSQYCVQLLEEPTGTDTQSIAVGVDPGKKYSGLGVQSANYTLWKGHLILPFETVKKRMEQPRMMRRGRRGRRINRKLPYKQRAHRQKRFNHRRGHKLPASIRANRQLEYRVVKELTKVYPICAIYYEDVEAKGDKAFTPVMVGEKFMLQWLEKLAPTHTKLGWETASLRRDLKLEKSRNQGESTPASHAVDGIALASHSFRGMEKINGKNYRGQVWQGEVNLTESPFTVLRRPPVSRRQLQLMVEPLGGVRRKYGGTVTRHGFCKGDYVQASRKDQAFFGWVSGDTKSQVSVSDANWKRLGQFSTNKIRLLKHSTNLVTTAKAVI

SEQ ID NO: 833 - protein, 333 aa, unidentified; identical to SEQ ID NO: 487
  REGION 1..333: note = Sponge metagenome

SEQ ID NO: 834 - protein, 364 aa, Brasilonema sp.
MRVSVLDKDGKPLMPTKPSRARRWLKEGKAKIVYNNLNVFCIQLLVEPSGYHQQSIALGLDPGKKFTGVGVQSVKFTLFMAHLILPFSDVTKKMSGRLILRRARRGRRINRNVAFNNRAHRQKRFDNRKQNKLSPSIRANKEMELRVTKELVKLFPITQITYEYVKARGDKGFSPVMVGQKVMLQWLEKIAPTNAQEGWQTSILRQQLGLTKDKKNKEKQTPETHAYDGIALAASNFMKFEKFHTANTRGHHWVGDVAITSAPFRVIARPNLFRRQLHFENPVSDAPKNRKRKGGTVTPFGLRSGDLVKAEKAGKFYIGWVGGYTQTAKTKNVSVYDHNWHRLGQFSPSKVQSIKRSTRLCIKP

SEQ ID NO: 835 - protein, 344 aa, unidentified; identical to SEQ ID NO: 575
  REGION 1..344: note = Oscillatoriales cyanobacterium

SEQ ID NO: 836 - protein, 365 aa, Microcystis sp.; identical to SEQ ID NO: 154

SEQ ID NO: 837 - protein, 391 aa, unidentified
  REGION 1..391: note = Cyanobacteria bacterium sp.
MFRVPVQNPDGSPAMPTKASRARRWVQEGKATAHWNDAGVYYVRLISEPSSRKTQKIVIGCDPGKSYTGIAVQSAKFTLYTAHLVLPFQRVKERMGAAVIKNGKMINSPRNRALQRLARRGRKINRKIPFAQRAHRQKRFDNRRKEGKLAPSIRASRQMERRVITELSKIFPIHSIVYELIRADVDLTSKRKSARSGKGFSPVMVGQYWCVEQLKSIAPVKTRHGWQKNGNGTSQVRKYLGLEKVKDKKAQVPEAHAVDGIALAASEFIRFGIIPGFTQDVHTWIGSVEITSSVFRIITRPAYFRRALHFDNREKGGVRKRKGGTLTPFGIRYGDKVVAEKAGKTYSGWVGGFTDAKSKNISIYDHNWKRIGQFSPKKVKRVRRSNKLCVA

SEQ ID NO: 838 - protein, 347 aa, unidentified
  REGION 1..347: note = Ga0315294_10110587
LSVHSVFVLHKDGMPLTPTKPARAKKLMKDGVAKPVWNKFGQFGIQMLVETRRETPKTALTIDNGTKFEGYSVVCGNENNINVMWKLPDKKKIVNKLTERRQLRRARRHRNCRGKACRFDNRNRKGFIAPSQLVIVNSRLKAIKEILKTYPINLIGIEDVRFKNKKKGNNLSTVEVGKNKIYEFLSKHAILHKFQGHQTQKLRKLYGYHKVRDKAKEDFRSHCSDSLAMATSLTMNRHIHAGKLIVVDDSYRPIRRRLHDTQFSKGHIRYPYSHGNFRRIRKGTICELGIMCGGTKKTAWIYNWYHYRIGKSLNKIGWLSKRFFISERAKFLHSTSRMVSFGSSGSW

SEQ ID NO: 839 - protein, 392 aa, Okeania sp.; identical to SEQ ID NO: 782

SEQ ID NO: 840 - protein, 396 aa, Coleofasciculus sp.; identical to SEQ ID NO: 810

SEQ ID NO: 841 - protein, 353 aa, unidentified
  REGION 1..353: note = Ga0315280_10000556
MRVPVVSVDGKPLMPTTPAKARKLMRGKQAEGRRDKLGIFYLQMLRPVGNKVQEIALAVDPGSRFDGYAVASGKETQVKGMVLLPKGIVDKLIRRSRLRRDRRSRNCRRRACRFSNRRRREAWIAPSQKAKVDFKLKVVRELCQLYPVTSIVVEDVRFNHYRKRWGKHFSTVEIGKTRLYHELKNLASFVTVEGWQTTEARKKYRIKKTRTKAALVPESHANDAVAMMCMHYGRNVNSPTSFFIWGAYNPVRRQLHKQKARKGGVRPAYGGTTGRYGIRKGDLVEAKVKGKMVRGWACSFSNTQVGVANFRGERFAIPTVRNVRLTHRATGVLYAEFLPSQRVSGKGGNPSSP

SEQ ID NO: 842 - protein, 337 aa, unidentified
  REGION 1..337: note = Ga0373625_0069134
MFVPVVNQQQEPLMPTTPSRAKRWIKSGKATPFFKKGIFCVRLNVEPSKQETQEIAVGIDPGSKKEGFTVKSLAHTYLNIQTDAVTWVKDAVEIRRNMRKARRSRNTPCRINRQNRKRGGLSPSTKARWQWKLRICNQLKRIFPIEVFVVEDIKARTWKGGKKWNQSFSPLEVGKSWFYNELEKLGKVELKQGYETKELRDLLWLKKTGKKTAEVFEAHCVDSWVLASSWVGGKVPDNKELLLITPLRFHRRQLHKLQPEKGGIRKRYGSTRSLGFKRGSIVRHPKYGITYIGGNSKNRISLHSLETGIRLCRTAKIEDCKFLTYNTERMRFIPKIN

SEQ ID NO: 843 - protein, 344 aa, Scytonema sp.; identical to SEQ ID NO: 33

SEQ ID NO: 844 - protein, 351 aa, Synechococcus sp.; identical to SEQ ID NO: 284

SEQ ID NO: 845 - protein, 336 aa, unidentified; identical to SEQ ID NO: 423
  REGION 1..336: note = wastewater metagenome

SEQ ID NO: 846 - protein, 365 aa, Microcystis sp.; identical to SEQ ID NO: 197

SEQ ID NO: 847 - protein, 387 aa, unidentified; identical to SEQ ID NO: 361
  REGION 1..387: note = coral metagenome

SEQ ID NO: 848 - protein, 337 aa, unidentified
  REGION 1..337: note = bioreactor sludge metagenome
MFVPVVDSNKNPLMPTTPSRARRMIKVGEATPFFRRGIFCVRLNREPSDRKVQDVALGIDPGSKKEGYTIKSEAHTYLNITADAKTDVKNKIESRRNARRAKRQRKTPYRKNRLNRARSKNHIPPSTKTRWDWKLTVINTLRQVFPVSHVIVEDICAKTLKGKRKWNLSFSPLEVGKMYFYDMIRNMQGIKLSLFKGYETYQLRNELCLKKSKKKLERSFNAHCVDSWTLCYSVVGGNKVPDNTQVTYISPIVLYRRQLHVFCFAKGGVRKNYGSTRSMGFKRGSLVKHEKCGYCYVGGSSKGKVSVHDLRTGNRIVRNIKPEDLILKSYSSWKLII

SEQ ID NO: 849 - protein, 342 aa, Chloroflexi sp.
MRIAVVDTRGIPLMPCTPAKARHLFKSGLARPKRNKLGLFYVQLCYEQEPENQPLVAGVDPGSKFEGYSVVGSKDTVINLMVEAPDHVKEAVETRRSMRRARRSRKWRKARVIAQLCKILPIGSVVVEDVQAVTREGRGRKWNALFSPVQVGKEHLYRRLCEMGLSVYLLQGYQTKELRAYYGLKKTKSKSKQSFDSHAVDAWVMAASESGADHPTCTRLWYMVGVQPHRRQLHRLQASKGGERKPYGGTRSLGLKRGTLVKHAKYGLCTVGGFGRIRKTISVHAYRTNKRLTQGARVKDCRILTWVAFRSWFVAKKQPKPFSKEGHPPHSTKKGTPLSSPA

SEQ ID NO: 850 - protein, 377 aa, unidentified
  REGION 1..377: note = activated sludge metagenome
MFRIAVRYKGQPLMPMKSNRVSKFIQSGRGKIRYDRKLRIHYLQLLSTPSGFRTQGITIGIDPGSSFDGISVVSTDTHHINIELIQRAKKGKTSIKAMKTRQSENRRVRRSRLRHRPIRFDSRTKKNSMTPTIRANVEFRKWLIERLCNLYPITRIVVEDVRFNHSKNQNGRAFSLVEQGKTELYNWIKNRRLILELYSGWDTKKLRINTFGGDPKVSDKGSKSFEAHCVDSFVLACDKDYLIDEETGEVFHDQPVAINNLQVRKNVTFIEKIVKVRRCLTRTRKLYETKGNPIGPRYYRKIKGGVKVPYQNFSSHRNLCRVKPSNEHSNHPKEWIWIDNGYTERFKYNTAPYGGTVLKGVKKFFKDNEWKNHILSN

SEQ ID NO: 851 - protein, 360 aa, Moorea sp.; identical to SEQ ID NO: 60

SEQ ID NO: 852 - protein, 365 aa, Microcystis sp.
MARVPVISKDGKPLMPTKPSRARRWIKEGKAIGKFNDLDIFYVQLTDEPSDNKTQPIAIGIDPGKLFSGIGVQSSLFTLWKAHLELPFKRVKERMDNRRLMRRGRRGRRINRQLPFNLRAHRQKRFSNRRTGKLAPSIRANRQLELRVVSELTKIYPITDIYFEYIKADIDLTSSRKGAKSGKGFSPVMVGQKWAIEQLSQFATVHTRFGWQTSNLRKHLRLEKSKNKAEQSPESHANDGIALACFKFLNYLPFHTSNGHGYDWKGYVKVTNAPFAVIKRPPVSRRQLHLMVFSKGGKRRKYGGSTTRHGFRKGDLVSSPKGIGYVSGDTEKQLSVSDTSWKRLGQIAVSKIQLIRRSNGLIVSH

SEQ ID NO: 853 - protein, 386 aa, Microcoleus sp.
MNRVPVVSKEGKPLMPTKPSRARRWVNVGRAVGKWSDLGVYYVQLTRSSSAEEVQPITVGVDPGKSYSGVGVQSAKCTLLQLHLILPFGRVKKRMETRAMLRRGRRGRRINRDVPFKQRNHRQCKFDNRKQCKLPPSIKASRQLELRTVMELAAIFPVTAIGYERVKADVDQTKRKRAKSGKGFSPVMTGQNWAISQMETIAPVYVREGWQKDGNGTSQLRTQLGLEKDKINKSIAKPETHAVDGVTLACGYFVRYVPFTGSNSYGYTHRGSVNVTSSPFKIITRPGAVKRGKEYGFFRRQLHFEVPDKSGKRKRKGGTITPFGLRIGDLVRAEKAGKIYIGYVGGFTDTKKTKNISVCDYTWKRIGQFAPSKVELIKRNNGLCVA

SEQ ID NO: 854 - protein, 386 aa, Coleofasciculus sp.; identical to SEQ ID NO: 853

SEQ ID NO: 855 - protein, 351 aa, unidentified; identical to SEQ ID NO: 180
  REGION 1..351: note = Oscillatoriales cyanobacterium

SEQ ID NO: 856 - protein, 406 aa, Spirulina sp.; identical to SEQ ID NO: 429

SEQ ID NO: 857 - protein, 344 aa, unidentified; identical to SEQ ID NO: 575
  REGION 1..344: note = Oscillatoriales cyanobacterium

SEQ ID NO: 858 - protein, 365 aa, Nostoc sp.
MQRVPVVDNLHQALMPTTPARARKWVESGKAVKRWSDCGQFYVQLTGEPSGRNTQDIVIGIDPGKLYSGIGVQSAKFTLYTAHLILPFQIVRDRMDARRLMRRGRRGRRINRKVIFSKRAHRQKRFSNRRQGKLAPSIRANRQLELRIVSELCKIYPVSEIRYEYVRADVDLTSGRKKARSGKGFSAVMVGQKWMLKQLEQLVPVVKVEGYQTASTRKHLGLAKNKTDKSKLEFNTHAVDGVAIAATAFVEYRQYHTIKVDGGNWFSSVAITPAVFRVIRRPPYSRRQLHLMVPVRGGVRRKYGGSTTRYGVRKSDLVNSPKGIGYVSGDTEKQVSVSNANWKRLGQIASCKVRLIRRSNGLIVA

SEQ ID NO: 859 - protein, 410 aa, unidentified
  REGION 1..410: note = Ga0315273_10010493
MRNEKIKREIRVAKIDPLPSQGNGTVARRQLNRLPVAGKSVKRVLPKPSSSVSVSLDGVHTTRLARASLQRIWQHVPVINHDRKPLMPTTPWRAERWIRSGKATPFWNKGIFCVRLNKLISGPKIQPIACGIDPGTKKEGLTVKSTAHTFINIQADAVWWVSKHVETRKMMRRNRRQRKTPCRAPRFNMGKDRNSFLAPSTKARWQWKLRLVNWLNKIFPISYFVIEDIKAKTKKGQRRWNVMFTQIEFGKNWFYSELKKIASVDRKTGFETFTIRNGLGLKKTKHKLSNKFEAHCIDSWVLANDYVGGHIRPDNTKMLFVVPLQFHRRKLHKLCPSKGGIRKRDGGTRSLGFKKGSLIKHPKYGLAYIGGYSNTNRITLHSLNTGERVSRDIRPEHCKFIAYLSWRTIR

SEQ ID NO: 860 - protein, 378 aa, unidentified; identical to SEQ ID NO: 446
  REGION 1..378: note = Ga0315279_10000059

SEQ ID NO: 861 - protein, 368 aa, Microcoleus sp.; identical to SEQ ID NO: 543

SEQ ID NO: 862 - protein, 390 aa, unidentified
  REGION 1..390: note = Ga0315277_10058131
VKSKKGQIKRTAEINTSECFSSSEHCKAHSCDASQLAAGTQSVGTTSKREDGAIRTYVVKHSVFVLDSKGRALMPTTPCRARKMLKAGVAKKVWSKFGTFGVQMLVETRREVEDTALGIDHGSKFEGRSVVCGKENVLNIKLDLPDKKKIVKKIEERRELRRTRRSRLRRREARFDNRKREDFIAPSQKVIVGSRLKIDAEICRIYPVNKVMIEDVCFNHSKKRWGKNFSTVEIGKKMIDRFFEDRGIEVEKRKGWETKALREKYGYKKIGNKSSDSFESHCCDSLSLAVEAIVGERVEPCKIIVVDDTYRCVRRRLYDSNIKKGGKLEAYSRGIVGGISKGVKIGTKSGKVGRLCGMDRGRWRYYDEAGKRQTVKKLEWISREFITRTI

SEQ ID NO: 863 - protein, 361 aa, unidentified
  REGION 1..361: note = Cyanobacteria bacterium sp.
MRVPVISSDEQPLMPTKPSRARGWVREGKAKGFFKDLSQYCVQLLEEPTGTDTQSIAVGVDPGKKYSGIGVQSANYTLWKGHLILPFETVKKRMEQPRMMRRGRRGRRINRKLPYKQRAHRQKRFNHRRGHKLPASIRANRQLEYRVVKELTKVYPICAIYYEDVEAKGDKAFTPVMVGEKFMLQWLEKLAPTHTKLGWETASLRRDLKLEKSRNQGESTPASHAVDGIALASHSFRGMEKINGKNYRGQVWQGEVNLTESPFTVLRRPPVSRRQLHLMVEPLGGVRRKYGGTVTRHGCCKGDYVQASRKDQAFFGWVSGDTKSQVSVSNANWKRLGQFSTNKIRLLKHSTNLVTTAKAVI

SEQ ID NO: 864 - protein, 371 aa, Dolichospermum sp.; identical to SEQ ID NO: 792

SEQ ID NO: 865 - protein, 403 aa, unidentified
  REGION 1..403: note = Ga0373630_0041537
MELQERQDASLVLPSSPEPFNGMFPHKELSSVHIVEGKLNPTNRVGAEPNRFRTPVIDAEDKPLMPCTSARARLLLKTGKAFAKRSKLGIFYLQLNRTVDAANQPLVLGVDSGSKFEGFSVVGTKDTAVNIMSKATTWIKKAVEQRKIMRRGRRYRKTRRRESRFSNRVNRKHVPPSTKARWDTKLRIIQQLEKILPIQTVVVEDIKALTRKNGKQWNNSFSPLEVGKQYFYTQINKKLIVKSGIETKTLRDSIGLKKLTNKSKPVFETHCVDAWALAASETGAKQPTTRSLYYIVPLRWNRRQLHMLQPSKGGVRRRQGGTISVGLKKGTLVKHSRYGFCFVGGSSNGKLSLHSVKDGERLTKNSKKEDCQVLTRIAFRTQFLKIPDTELAKTLKGLVPKGE

SEQ ID NO: 866 - protein, 377 aa, Scytonema sp.; identical to SEQ ID NO: 38

SEQ ID NO: 867 - protein, 365 aa, Microcystis sp.
MARVPVISKDGNPLMPTKPSRARRWIKEGKAIGKFNDLGIFYVQLTTESSNNKTQPIAIGIDQGKLFSGIGVQSSLFTLWKAHLELPFKRVKERMDNRCLMRRGRRGRRINRQLPFNLRAHRQKRFSNRRQGKLSPSIRANRQLELRVVSELTKIYPITDIYFEYIKADIDLTSGRKGAKSGKGFSSVMVGQKWAIEQLSQLAKVHTRFGWQTSNLRKYLRLEKSKNKAEQSPESHANDGIALACFQFLDYWPFHNSNGHGYDWKGYVKVTNAPFAIIKRPPISRRQLHLMVFSKGGKRRKYGGSTTRHGFRKGDLISSPKGIGYVSGDTEKQLSVSDTNGQRLGQITVSKIQLIRRSNGLIVSH

SEQ ID NO: 868 - protein, 385 aa, Ammonifex sp.
MPWLTKTSLSLADGAEATITSVWEKGVSFFMSTKSNEQPRVPVVNVDGKPLMPTTPRKARLLIKDGLAKPQRNKLGLFYVQMTRPVGTKTQPTALAEDPGAKYDGVAVASRRQVELRAMVFLPDDVPQKMDARKNLRRARRYRKTPRRPKRFDNRKRKKYWLAPTQRSKVETRLKVVRELCKIYPIQLIVTEDVRYNHYRYRDGKYFSTVEIGKTLTYREYRKLAELKLVEVSDTDAWREKFGLFKLTTRKWEQVPETHANDAVAMLMGTTGCENNPSAPFFVWRRLRYARRSLHRQNPQRGGMRSRFGGTSNGGFLCKGDWVEAEKAGRVYRGWVCGLPTEITKLVGVADADGKRIGQFSPKKTRLLARSTGFSWKEVKTAFLP

SEQ ID NO: 869 - protein, 365 aa, Microcystis sp.
MARVPVISKDGKPLMPTKPSRARRWIKEGKAIGKFNDLDIFYVQLTDEPSDSKTQPIAIGIDPGKLFSGIGVQSSLFTLWKAHLELPFKRVKERMDNRRLMRRGRRKRRINRQLSFNLRAHRQKRFSNRRTGKLAPSIRANRQLELRVVSELTKIYPITDIYFEYIKADIDLTSGRKGAKSGKGFSSVMVGQKWAIEQLSQLATVHTRFGWQTSNLRKHLGLEKSKNKAEQSPESHANDGIALACFQFLDYWPFHNSNGHGYDWKGSVKVTNASFAVIKRPPISRRQLHLMVFSKGGKRRKYGGSTTRHGFRKGDLVSSPKGIGYVSGDTEKQLSVSDANWKRLGQITVSKIQLIRRSNGLIVSH

SEQ ID NO: 870 - protein, 172 aa, unidentified; identical to SEQ ID NO: 761
  REGION 1..172: note = Oscillatoriales cyanobacterium

SEQ ID NO: 871 - protein, 327 aa, Scytonema sp.
MQRVPVLSKDRARLMPTKPSRARRWLKEGKAKVVHNDLGIFHIQLLFDASGDEVQEIVVGVDPGKHYTGVAVQSTKFTLWMAHLQLPFKTVRDRMEQRRMMRRGRRSRRIDRKRPFKQRAHREKRFDNRRYTKIPPSIRANRDLEKRIIDELWLIFPFVKVVYEKVRASGDKGFSPVMVAQKWNLERLAAERYEVSTIEGWQTSNIRTYLGLHKQKHSKGDAIPATHAVDGVAIACSAFIRYGITSRVSQGWVGKVTVTPAPFTVIRRPPVSRRQLHLMVPAKGGIRRKYGGTVTRHGFRKGDYVEAILGDKTYRGWVSGDTENKFL

SEQ ID NO: 872 - protein, 391 aa, Okeania sp.
MIRIPVQNSDGSPAMPTKASRARRWVKQGKATEYWNDAGLYYVRLVAEPSGRETQKITVGCDPGKNYTGIAVQSANFTLYTAHLVLPFDRVKERLGSAVIKQGKVIKNVRGRALQRRVRRGRRINRKVPFNQRAHRQKRFDNRCKKGKLAPSIRASREMEIRVITELSKVFPITTIVYELVKADVDLTSGRKGARSGKGFSPIMVGQNWCVEQLRSIVDVKTIYGWQKNKNGTSQIRKHLGLEKIQNKKAQVPESHAVDGIALAASEFVRYGVTPRKNCDTWGWIGSVNITQGIFRVITRPAYFRRALHFDNAEKGGIRKRKGGTITPFNVRYGDKVLAEKAGKVYMGWVGGFTNAKAKNISVYDCNWKRIGQFSPQKVKLIYRSNKLCVV

SEQ ID NO: 873 - protein, 364 aa, unidentified
  REGION 1..364: note = Cyanobacteria bacterium sp.
MRIPVIDPGGKPLMPTKPSRARKWIAAGRAIGKWSDCGQFYVQLTTEPSGRETQDIVIGIDPGKKYSGLAAQSAKFTLYTAHLILPFQTVRDRMDARRLMRRGRRGRRINRKVVFSERAHRQKRFSNRRTGRLAPSIRANRQLELRIVSKLCKLYPVTEIRYEYVRADVDLTSGRQKAKSGKGFSAVMVGQRWMLQQLEQFAPVVTIEGWRTASIRNHLGLAKNKKGKSKPEFETHAVDGVAIACSYFVEYREFHTKTERGRNWFGSVEVTPALFRVVRRPPYSRRQLHLMVPSGEGIRRKYGGSTTRHGVRKGDLVDSPKGIGYVSGDTEKQISVSDTNWKRLGQISASKVTLIRRSNGLVVA

SEQ ID NO: 874 - protein, 408 aa, Peptococcaceae sp.
LRTNPAECFPSSVFGWGEAHPPGAKAQHSRRLQGRRNVFLHKYSERRGSIPMLRIPVVSKDGKPISPTIPSKARKMIRDGVAIPKRDKLGNFYIQMNIPVGEEISHKTVAGIDPGKLYSGIAVQTPKATLWIGHLILPFPEVKKAMKSRKQLRRGRRYRKTPQRECRFLHRTGHKIPPSIRSNREMEYRVLTELRKIYPIDEVVYEVVKANGSKSFSPVMVGQKWQISRISKILPITIREGWETSTMRKHLGLLKNREKSKASPQTHAVDGIALAATNLLAYKPYVKTSEHGHLWSGECVITEAPFSVVQRSLLFRRKLHVENFAKGGIRKRHGGTTTPYGFRKGDYVEAEKAGRTVRGYISGYSEASGVVSVADSRWRRIGQFTVSKVRLLQRSCHLLVDHKNCVSI

SEQ ID NO: 875 - protein, 341 aa, unidentified; identical to SEQ ID NO: 561
  REGION 1..341: note = Candidatus Poribacteria bacterium

SEQ ID NO: 876 - protein, 385 aa, unidentified
  REGION 1..385: note = Cyanobacteria bacterium sp.
MNRIPVVSKDGQPLMPTKPSRARKWVESGRAVGKWSDLGLSYVQLLQEPSGTETQPVVAGLDPGKSYSGVGVQSAKCTLLQLHLILPFGRVRARMDQRRLLRRGRRSRRINRDVPFKLRNHRQKRFNNRRGNQLAPSIRASRQLEIRVVKEIATIYPITAIGYEKVRADVDLTSGRKGARSGKGFSPVMIGQKFCISELEKIAPVDVREGWQKDGNGTSQLRTALGLVKDKQNKSEAKPETHSVDGVALACSYFIQFRCFYSSRGHGKTWKGKVTITNSQFRIITRPGAVKRGKEYGVFRRQLHFEVPSKNGVRKRKGGTITPWGFRVGDLVRANKGKTESIGYIGGYSEVNKVVSLYDWQWKRIGQFSVSKTTLIRRSNGLCVA

SEQ ID NO: 877 - protein, 367 aa, Calothrix sp.; identical to SEQ ID NO: 672

SEQ ID NO: 878 - protein, 386 aa, Calothrix sp.; identical to SEQ ID NO: 729

SEQ ID NO: 879 - protein, 297 aa, Microcoleus sp.; identical to SEQ ID NO: 737

SEQ ID NO: 880 - protein, 365 aa, Microcystis sp.; identical to SEQ ID NO: 564

SEQ ID NO: 881 - protein, 362 aa, Sulfobacillus sp.
MASSEGAPILHKETYRMAQKFVPVLAHDGHPLMPTIPSRARRWIKTGKATPFWSHGLFCVRLTVAPSHTQTQAIATGIDPGSKREGYTVKSTAHTYLNIQAEAVTHVKKAVKTRYTMRHHRRYRQTPCRKHRKNRQRGGLPPSTKARWQWKLRIARWLMQIFPITVFVVEDVTASTRPGKRRWNRNFSPLEVGKHWFYAQLALLAPVLRQSGWETQQQRDALGVKKTSRKLAEVFAAHAVDSWTMAYQVVGGSPIPENTTLFCIAPIRLHRRQLHRLEPKKGDHGIRRPYGSTRGQGFKRGSLVQHPQWGVVYVGGTMGGQISLHRVSDGHRLTQNACPADCRFLTYNAWKSHWAEARGTKS

SEQ ID NO: 882 - protein, 333 aa, unidentified; identical to SEQ ID NO: 731
  REGION 1..333: note = Ga0373629_0002383

SEQ ID NO: 883 - protein, 401 aa, Arthrospira sp.; identical to SEQ ID NO: 109

SEQ ID NO: 884 - protein, 223 aa, Calothrix sp.
MFVPVVDSLSRPLMPTTPSRARRWIKQKKATPFWRKGIFCVRLNVEPSDRNYQPIAVGVDPGSKREGYTVKSKTHTYLNIQTHAVDWVKDHVETRRNMRRSRRFRNTPCRQNRKNRLVNKQKLPPSTRVRWQWKLRICTWLASIFPVTVFVVEDIKAKTWKGARKYNVMFSPLEVGKKWFYSELEKLALLEIKTGNDTYELRQTLELKKSKNKLPNKFEAPPR

SEQ ID NO: 885 - protein, 351 aa, Acidithiobacillus sp.; identical to SEQ ID NO: 213

SEQ ID NO: 886 - protein, 327 aa, Scytonema sp.; identical to SEQ ID NO: 871

SEQ ID NO: 887 - protein, 228 aa, Microcoleus sp.
MFVPVVDSENRPLMPTTPSRAKHWIKSGKATPFWKKGVFCVRLNVEPSNTNRQPIAVGIDPGSKREAFTVKSQSHTYLNIQTHAVDWVKDHIEVRRNMRRARRFRNTPCRQNRANRLVNKSRIPPSTKARWQWKLRIANWLTKMFPISAFVVEDIKARTWKNGRKWNASFSPLEVGKHWFYPELKKIAHLETKSGNDTYERRPSLGLKKSKQKLSNKFEAHCSLTLGC

SEQ ID NO: 888 - protein, 337 aa, Arthrospira sp.; identical to SEQ ID NO: 85

SEQ ID NO: 889 - protein, 379 aa, Cyanothece sp.; identical to SEQ ID NO: 254

SEQ ID NO: 890 - protein, 329 aa, Moorea sp.; identical to SEQ ID NO: 57

SEQ ID NO: 891 - protein, 402 aa, unidentified; identical to SEQ ID NO: 371
  REGION 1..402: note = Deltaproteobacteria bacterium sp.

SEQ ID NO: 892 - protein, 357 aa, Mastigocoleus sp.
MLRVPVVDKNGLPLMPTKPSRARRWLKEGKAKVWKNDLQVFAIQLTFEPSNCKEQLIVAGIDPGKHFTGIAVQSAKSTLWLGHLFLPFQKVKDRLEQRTMMRRTRRSRRIDRKLPYNQRAHRQKRFDNRRQNKVPPSIRANRDLEKRVLDELERLFPLLDVVIESVQAKGDKGFSPVMVAQKWRVKRLSKNYDVTTIEGWQTAQVRRELGLIKQKHSKADAIVATHAVDGIALAASKFMSYQITSGDSRGWVGSVDVTACPLTVIRRPPVSRRQLHLLQFSKGRNRRKYGGTVTRHGFRKGDFVEATQGTKTVRGWVSGDTKTQVSVSNADWKRLGQFSVRKTKLLKRNSGLIVNIT

SEQ ID NO: 893 - protein, 380 aa, Iningainema sp.
MQRVPVLSPDGKPLMPTKSSRARRWLKEGKAKIAHNDLNVFCIQLLVEPSGTDIQPIALGLDPGKKFTGAAVQSAKFTLFMAHLILPFPEITKKMSVRRILRRARRGRRINRKVPFEQRAHHQKRFNNRKQNKLPPSIRANKELELRVTKELVKLFPVSQITYEYVKAKGDKGFSPVMVGQKVMIEWISSLAPTNTQEGWQTSILRQQLGLAKDKKNKEKQTPETHAHDGIALAASNFMQFEKFHTANSHGHLWVGEVTITNSLFCVISRPNLFRRQLHFENPVKDAKSAGQKFRGSELCTPNNRKRKGGTVTPFGFRSGDLVKAEKAGKTYIGWIGGYTQTEKTNKVSVYDHNWHRLGQFSPSKVKLLKRSSRLCVAIL

SEQ ID NO: 894 - protein, 339 aa, unidentified
  REGION 1..339: note = Candidatus Poribacteria bacterium
MFVPVKSTSGKRLMPTHPNKAGVLIKKGLATPYWSNGIFCIRLNYKTEEYTQEIAVGVDPGSKKEGFTVKSESRTYLNLQADAHDKVSKKVAKRRQLRRTRRSRKCPNRKNRTNRLANKERIPAGTRARWDWKLRILDWLSKLYPITHVCVEDIKARTIQCTKKWNQSFSPLEVGKQWFYSEIKKHWELLTLQGWETKEIRDRLGLKKSRKKLSETFDAHCVDSWCLAYHRVGGSSVPDNSDIFCISPIPIRRRDLHRQNPQKGGKRPRYGGTTSNGLVKNTLVKHIKHGLTRISGFGKAGISLYSLQGKRLCQNAKIQDFKVLTRLNFNYRSGVSSLP

SEQ ID NO: 895 - protein, 369 aa, Planktothrix sp.; identical to SEQ ID NO: 147

SEQ ID NO: 896 - protein, 317 aa, Planktothrix sp.; identical to SEQ ID NO: 127

SEQ ID NO: 897 - protein, 356 aa, Chlorogloeopsis sp.; identical to SEQ ID NO: 256

SEQ ID NO: 898 - protein, 358 aa, Moorea sp.; identical to SEQ ID NO: 394

SEQ ID NO: 899 - protein, 422 aa, unidentified
  REGION 1..422: note = Ga0315296_10000160
MVVSTQVLTRRPDSQSRVSGVEGYKNGRMRDLVLPSSSEPLNGTASRKGLSLPCSVEGHSTRTGEPAIGRVPVVSTNGKPLMPCRPSKARNLLKKGLAEKRWNKLGQFYLRLKFQPRSELNKDQQLCLAADTGSKWDGVAVISKKEVLTCGMLVLPSKVAEKLEQRRQIRRARRYRKTPRRAKRFDNRRRPDGWIAPSQKAKVDFRIKVVDEQSKIYPIDRFAVEDVRFNHYKKRWGKYFSTVEIGKAAFYKHLRRLGSLNLYTGVQTAEWRSKLSLPKNPVKRELSWDTHAVDAIAIGCAEVGCESPYPLEFWVWKRFEYARRQLHRLEPDKGDIRRRYGGSWSIPPFKKADVVMWRGRLARVGGYMDGTVSLHAFTLKNKRITQDANPADCTCLYSQRIFYRQETLQFLPALKDGVSLGI

SEQ ID NO: 900 - protein, 371 aa, Tolypothrix sp.
MRIPVVSKDGRPLMPTTPSRARRWIKDGKAIKRWSKLGVFYVQLTVDSSDTKTQPIVIGLDPGKLYSGVGVQSSKFTLLMLHLVLPFKTIKDRMEQRAMMRRGRRGRRINRKLPYIQRAHRQKRFDNRKQKKVPPSIRANKTLELRIVSEIAKLYPIQSIIVERVMARGDKGFSPVMVGQLWLFSQIEDLLSIKPTIIQGWETSNLRKHLSLPKDKQDKSRQAPETHAVDGVTIAASRWVKYGITSINSMGWKGQINITPSQFVIIKRPPVSRRQLHLMVPTKGGVRRKYGGTVTRHDFRKGDYVEATQGSKTYRGWVSGDTEKQVSVSDSTWRRLGQFTAKKVRLIQRSTGLIVLSTRKLLNLLPLKESV

SEQ ID NO: 901 - protein, 357 aa, unidentified
  REGION 1..357: note = Ga0373625_0000329
LFVPVIGKEGKPLMPCHPARARELVRSGRAVRRFDRGLHYIRLTDRADGDVQPIAVGIDPGSKKEAFTVKSEARTFLNIQADAVTWVSERMKTRSEMRHGRRGRNAPYRERRPNRGVKKGWIPPSIRARWGWKLRLCNWLSRYYPISVFAVEDIKAKTLKGKRRWNRSFSPLEAGKGWFYVELRKLARVETYAGHEVKALRDALGLRKTRDKMSNRFEAHCVDSWVLANAEVGGHIGPDNVGIMYIVPLKFHRRQLHYLQPRRGGERAPYGGTISLGLKRGTWVRHPRHGVAYVGGFRNDRISLHGLRDGRRLCQNAKPDDCIVLTRCSWRVYTEEKNARFTGASPLIKVLRQRRMV

SEQ ID NO: 902 - protein, 357 aa, unidentified; identical to SEQ ID NO: 671
  REGION 1..357: note = Sponge metagenome

SEQ ID NO: 903 - protein, 365 aa, Microcystis sp.; identical to SEQ ID NO: 670

SEQ ID NO: 904 - protein, 358 aa, Moorea sp.
MLRVPVISPDGKPLMPTKASRARRWLLCGLAVVYPNDLNVFAVQLVNQPSGNQTQDIAIGIDPGKMFSGMAVQSSKITLWTGHLILPDKKVRERMDTRRMMRKTRRSRRIDRKVAYSQRSHRQKRFSNRRVKRVPPSIRANRQLENRVTKELCFLYPVNVIVYEVVKARGSKGFSPVMVGQYWAISQLEQIAPVIQKQGWETALKREALGLIKDKTDKSQQTVNTHAVDGIALAATHFFRRQNYYHRNGKLSVPKNCDVTNAVFSVIRRAPISRRQLHLLQFSKGGKRRKYGGTTTSHGFRKGDYVEAVKAGITYRGWVSGETVRQVSVSDVNWKRIGQFTARKVRLLKRSTGLIVNH

SEQ ID NO: 905 - protein, 365 aa, Scytonema sp.; identical to SEQ ID NO: 29

SEQ ID NO: 906 - protein, 256 aa, unidentified
  REGION 1..256: note = Cyanobacteria bacterium sp.
MYRVPVLSKNGEPLMPTKASRARRWLKEGKAVIYKNDLHSFAVQLTVDSGEETQPVAVGIDPGKHYSGIGVQSSKATLFTAHLELPFQRVKDRMETRAMMRRGRRGRRINRKLPFNLRAHRQKRFNNRRGHKLPPSIRANRQLEYRVVKELSGLFPISSIIYEIVKAKGDKGFSPVMVGQKVMTEQWLPEIAPVTTKYGWETSARREMLGLEKDREKSNQTPATHAVDGVALASYQFLKYKRIQGYKGWFEGSVEL

SEQ ID NO: 907 - protein, 355 aa, unidentified; identical to SEQ ID NO: 778
  REGION 1..355: note = Ga0214071_1336518

SEQ ID NO: 908 - protein, 348 aa, unidentified; identical to SEQ ID NO: 190
  REGION 1..348: note = fermentation metagenome

SEQ ID NO: 909 - protein, 378 aa, unidentified; identical to SEQ ID NO: 446
  REGION 1..378: note = Ga0373626_0003683

SEQ ID NO: 910 - protein, 397 aa, unidentified; identical to SEQ ID NO: 406
  REGION 1..397: note = Ga0315294_10032635

SEQ ID NO: 911 - protein, 313 aa, unidentified
  REGION 1..313: note = wastewater metagenome
KKGFFAIRLNYGSSGYKQAVLLGIDPGSKRTGMTVATEQKSVLHLQSDAPIWVKKKVETRGNLRTTRRGDCPSRLHKQNKKRNKKFVAPSSRARWGAHLRLLCVLLKIIPITDVAIEDIKAKTRKNHQPKAGAKKGQTSKNWNENFSPLEVGKKYFESEIKKLGLNLYKFAGYETFEHRKLHGYKKSTKKLSDDFSAHCVDSFSLCEMINGWQLELTSKKIYKITLLEFFTRQLHVQNPIKGGVRKNLGSTRSMGLNRGTLVEHPKHGRAYVGGTSKDRISLHSQQTGKRLSQSVKVEDCKILTNQSWTNNLI

SEQ ID NO: 912 - protein, 223 aa, Calothrix sp.; identical to SEQ ID NO: 884

SEQ ID NO: 913 - protein, 364 aa, Scytonema sp.
MRVPVLNQNGKPLMPTKSSRARRWLKEGKAKVVYNDLNVFCIQLLIEPSGYEQQPIALGLDPGKKFTGVGVQSAKFTLFMAHLILPFSDVTKKMSVRLILRRARRGRRINRKEPFNQRTHRQKRFDNRKQNKLPPSIRANIELELRVTKELLKLFPVTQITYEYVKAKGDKGFSPVMVGQKVMLQWLEKIAPTNKQEGWQTSILRKQLGLAKDKKNKEKQTPETHAHDGIALAASNFMKFEKFHTANTRGHHWVGEIIVTSAPFRVVARPNLFRRQLHFENPVKNVSGNRKRKGGTITPFGLRSGDLVKAEKAGKVYIGWVGGYTQTAKTKNVSVYDHNWHRLGQFSPSKVQLLKRNTRLCVVS

SEQ ID NO: 914 - protein, 365 aa, Microcystis sp.; identical to SEQ ID NO: 226

SEQ ID NO: 915 - protein, 407 aa, unidentified
  REGION 1..407: note = uncultured Syntrophaceae bacterium
MPTRKPRVKRENRVGEFASADVRTTLNHLPVAGRGTSRMLHQSATATMVSPEVGNCPAPSGAGRGAGNRTLLYVPVQDKNGRPLMPCHPARARELVRKGRAVRRFSKGIFYIRLLDREGGMTQEVAVGIDPGSKKEGFTVKSEAHTFLNIQADAVTWVKDAVKTRRDMRKKRRSRNTPCRQPRSNRSVGKWLAPSTRSRWGWKLRIANWLSKLYPVSHFVVEDIKARTTGQRKWDVSFSPLEYGKTWFYEELRKTAPVDTNSGWDTKQMRDAAGLKKSKNKMAVSFDSHCVDSWVMANSWTGGHIQPDNTRIMCLFPLQFHRRQLHYLQPSKGGVRRPYGGTRSLGFKRGSLVKHPKYGTVYVGGTAQGRISLHSMADGRRLCQNAVLSDCKFLAYNSWRQATCPVS

SEQ ID NO: 916 - protein, 398 aa, Symploca sp.
LGRSKKGHLGADGGKEQVTFKRFGLSLMQRVPVISPQGKALMPTKPSRARKWLKKGKARIYKNALNVFAIQLIDEPSGEEAQDVVIGIDPGKMFSGVGVQSSKATLLKLHLILPFPNVTKKMTRRRILRRARRGRRINRKLPYSQRCHKAKRFDNRVQKKLPPSIKANRQMELRVVKEIVRLFPVSNMVYEYIKARGDKGFSPAMVGQKVMLKWLERIAPTATQFGWQTSNLRQWLKFPKDKADKSLAVEETHSNDGVALAASHFIKWKKWHSTKAHGGYWEGEICLTSAWFLVIAKPNIYRRQLHFENPDSKKPNPTQCRKRKGGTVSPFGFRSGDFVQAEKAGQIYRGWIGGYTQTAKSKNVSIYDINWKRIGQFSPNKVRLLKRSTKLLVSGATS

SEQ ID NO: 917 - protein, 374 aa, Tychonema sp.
MALQKTLQALFLTRNHSVSQSRRELNNQAYRQTNAMQYVPVVDFDQRPLMPTTPARAERWIKSRKATPFFRKGVFCVRLNVQPSTRHTQPVAVGIDPGSKREGYTVKSKAHTYINQQFHAVDWVKDAEEASTNARRARRYRKTPYRPNRQNRKRGGIPPSTKARWQIKIRVVKVLAAIFPISHIGIEDVKATTKKGSKTWNTSFSPLEVGKQWCYSELEKIAPVTKFDGYHDTFLTRQELSLKKSKAKLSNDFKAHCVDSWVLAYLLVGGGSFPENTTVMECKQIRIYRRQLHVFNPGKDGNRRPYGGSMSQGLKRGGIVKHPKYGKCYVGGEDAKKSRISLHSLDTGKRLCQNAKPTDCKFLAYNSWRTVKPS

SEQ ID NO: 918 - protein, 371 aa, Dolichospermum sp.; identical to SEQ ID NO: 156

SEQ ID NO: 919 - protein, 377 aa, Moorea sp.
RWSRGRVINPNTFLVRFITMLRVPVISPDGKPLMPTKASRARRWLNQGLAVIYQNDLNVFAVQLVNQPSGEQTQDIAIGIDPGKMFSGIAVQSNNATLWTGHLVLPYKKVRVRMDTRQMMRRTRRSRRINRKVPYSQRSHRQKRFSNRVSKKVPPSIRANRQLEQRVAKELSLLYPVKAIVYEIVKARGNKGFSPVMVGQYWSISQLEKIAPVTQKQGWETALKREALGLVKDKTDKSRQSVNTHAVDGIALAATHFFRRKNYYHSKGKLSVPENCNITNTLIFVIRRAPISRRQLHLLQFSKGGKRRKYGGTTTSHGFRKGDYVEAVKAGKVTRGWVSGETARQVSVSDIDWKRIGQFTARKVRLLKRSTGLIVNY

SEQ ID NO: 920 - protein, 387 aa, unidentified; identical to SEQ ID NO: 361
  REGION 1..387: note = coral metagenome

SEQ ID NO: 921 - protein, 337 aa, Arthrospira sp.; identical to SEQ ID NO: 85

SEQ ID NO: 922 - protein, 421 aa, unidentified
  REGION 1..421: note = Ga0315296_10033857
MQTLTRRLGSRSRVSGVDGYKNARVRDLALDNSLEPLNSAVTKNGSLSLPCNVEGHSTQTGEPVIGRVPVVSADGTPLMPCKPSKARKLLELGLAEKHWNKLGQFYLQLKFQPKSDLNVNQQICLAVDPGSKWDGLTVVSKEVVVTSGMLALPSKVAEKLTQRREMRRARRYRKTPRRAKRFDNRRRRDGWIAPSQKAKVDFRTKIVDELCRLYPVNRFAVEDVRFNHYRKRWGKHFSTVEIGKAEFYKHLRMRGELTLYTGVETATLREKFRLQKNPVKRELTWTTHAVDAIAIGSAEVGCVNPYPPEFWVWKRFEYARRQLHRLEPDKGDVRRRYGGSWSIPPFKKGDVVLWRNRLARVGGFMDGHGISLHSFGLKNKRFTQDANPHECTKLFNQHIFGKQEQPQFLPPINGVGFLGGS

SEQ ID NO: 923 - protein, 387 aa, Acaryochloris sp.
MILRVPVISPEGQPLMPTKPSRARRMVRDGKAVGKWNDAGVYYIQLTADPSDTQTQPIHLGCDPGKSYSGIAVQSAHFTLYTAHLVLPFQRIKERLGAAVIKNGKVIKNVRGRALQRRVRRGRRINRKVPFHLRAHRQKRFNNRRQPKLPPSIKASRQMELRVIKELSKIFPITSIVYEVVKADVDRTSGRKGAKSGKGFSPVMTAQYWAMEQLEAIAPVIKRHGWQKDGNGTSQIRKHLGLIKCKDKKAQAPEAHAVDGIALAASQFTRYQASQSDSMDWVGSIDVTPCQFRVITRPAYFRRALHFDNPGKGGTHKRKGGTVTPWVFRSGDLVVGEKAGKVFRGWVGGYTKKAKSVSLYDHNWRRIGKFVVSKCTLLRRSNKLCVA

SEQ ID NO: 924 - protein, 382 aa, Geitlerinema sp.; identical to SEQ ID NO: 6

SEQ ID NO: 925 - protein, 364 aa, Calothrix sp.; identical to SEQ ID NO: 134

SEQ ID NO: 926 - protein, 379 aa, unidentified
  REGION 1..379: note = human metagenome
MFKGNKEIRKVPVRYKNKPLMPTTWNKALKLMKLKKAILVKDKVLGVYLKLKFKPKTTYTQPIALGIDPGSMFDGYSVISEDDDNHRNFQFNHQLPISKSLKSIMDKRKGYRRIRRSRLRYRKARFESRTGNKMTNTSNYYYQNRVNMIDRFTNIYPIKLIAIEDVKFNHYSSNKGKSFSNIEIGKNKLYDYITKTLKLKLYKVKGKQSKEMREIIFPDRIKNKDKSIRNFDSHCIDSFVIGVLGLSEKVSDSYRFIINLFNKNQLNKLNTLVRFIDRVTYKYRRELNRLKNRIKDSRFYFRYKKGGIKVKIDHYSKLKRLRVKVNDNKSNHGPWNYLYTKPELTYKKFITNYGGTIGKDGISKYWNGNYYKYYNISVA

SEQ ID NO: 927 - protein, 341 aa, Ktedonobacter sp.; identical to SEQ ID NO: 632

SEQ ID NO: 928 - protein, 421 aa, unidentified
  REGION 1..421: note = Ga0315285_10087313
MQGLTSRLGSRSRVSGVEGYKNGTMRDLVVPISGEPLNPTTDRKASLSLPCNDEGHETRTGEPVIGRIPVVSVDGTPLMPCRPSKARKLLKNGLAEKRWNKLSQFYLQLKFQPKSELNVNQQVCLAVDPGSKWDGIAIVSRKGVLTCGMLVLLSKVAEKLTQRREMRRARRYRKTPRRAKRFDNRRRRDGWIAPSQKVKVDFRTKIVDELCRLYPVSQFAVEDVRFNHYKKRWGKHFSTVEIGKAKFYKHLRKLGKLTLYMGTETAELRKKFGLPKNPVKKELTWTTHAVDAIVIGSAEVECVNPYPPEFWVWKRLEYARRQLHRLEPDKGGVRRRYGGSWSTPPFRKGDVVLWRGKLARVGGFMDGYRISLHSFGLKNKRFTQDANPNECARLFNQHVFSRREQPQFLPPINGVGFLEGS

SEQ ID NO: 929 - protein, 378 aa, unidentified; identical to SEQ ID NO: 446
  REGION 1..378: note = Ga0373630_0000013

SEQ ID NO: 930 - protein, 417 aa, unidentified
  REGION 1..417: note = Ga0307928_10006388
VACNDDSKATVDYTKLRLKNMPETTRNELQERQNAPLILTSSEESFNSTNGQNSSSPAIRSMFVSHCGSGYNSQSGASMSGHSVFVLDVNGNPLAPCKPSKARKLLKGKQAKSVWNKFGMFGIQMLVETRKEHPETKLGYDLGTKFEGHSIVCGKENNLSVMWKLPDKKKIVRKKKEQRELRRARRFRNCRRRPVRSDNRNKDGFIAPSQLVILQSRLKALSELFRCYPIDISVVEDVKFNHRDKRWGKNFSTMEIAKNKMYAWIKERSKLVLVEGHETQEKRKKLGYRKTRDKGAEKFTAHCTDALTLATDRTIIPGDFVVVDDTYRPVRRRLHDTQFSKGGIKYPYSTGNFKGIKKGTICEYGQICGGTKNTVWIRDKNNKRIGRAVSKIGWLSHNFKTSIPPPIKMSGLLEVTV

SEQ ID NO: 931 - protein, 365 aa, Gloeocapsa sp.
MQRVPVISKDNQPLMPAKPSRARKWIKQGKALGKFNDLGIFYVQLTKSSSRENTQPISVGIDPGKLFSGIGVQSSLYTLWTAHLELPFNRVKERMDNRCLMRRARRGRRIKRKLPFKLRAHRQKRFSNRKQSKLAPSIKANRQLEIRVVSELSKIYPITGIYFEYVKADVDLTSGRKKAKSGKGFSAVMVGQKWAIEQLSKIASVHTRFGWETSNLRKHLRLEKSTNKAKKSPESHANDGVALACFQFLEYSSLHTKNSKGYYWKGKVNLTKAIFAVIKRPPVSRRQLHLMVPAKKGVRRKYGGTTTKFGLRKGDLVFSPKGIGFVSGQTEKQISVSDANWKRLGQISFKKVKLIRRSTGLVVTC

SEQ ID NO: 932 - protein, 341 aa, unidentified
  REGION 1..341: note = Sponge metagenome
MFVPVKSKSGEQLMPTRPNKAGMLIKKGLATPYWSNGIFCIRLNYDTDAYKQEIAVGVDPGSKKEGFTVKSESHTYLNVQADAHNKVGKKVEKRRELRRGRRSRKCPNRKNRTNRMANKERIPAGTRARWNWKLRVLDWLSKLYPLTHVCVEDIKARTIQRAKKWNQSFSPLEVGKQWFYSEIQKRWELYTLQGWETKEIRDRLGLKKSSKKLSETFDAHCVDSWCLAHHTVGGLDIPDNTTLLCISPIPIKRRELHRQQAAKGGKRTRVGGTLLGKGLVKNTLIRHVKYGLARLAGVNAKGLFSIYSMENKRFTTGAKRSDFRVLTRLNFYYRSGHSAPT

SEQ ID NO: 933 - protein, 389 aa, unidentified
  REGION 1..389: note = uncultured cyanobacterium
MNSKINQASRVPVVDPDGKPLMPTTPARVRKWIVQGKAIPKRNKLGVFFVQLTNKPSGYSTQPIIAGVDRGKCFTGIAFQTKLVTIALFHACLPGFYKSKNLGKKNQTLDRQSVTGKMDKRAELRRTRRGQRINRKRPFKLRNHREKRFNNRRHKKLPPSVLSNRQMELRILNEMALILPISEIRDEACGGNTKKNGLGISPVTVGQEWFRAEASKIAHVVEVSSLETGKYRDRLRLVKDRDDKSRQTPETHANDAIALAASYFIQYRPFHTANTHGHEWVGECTVTSAPFIVLNRPKLFRRKLHQENYSKGGILKRQGGTITPFIFRSGDYVETTFKGDKVRGWIGGFTNTGKTQNVSIYDHNWSRVGQFNPKNIRLLQRSSRLCVTR

SEQ ID NO: 934 - protein, 366 aa, Moorea sp.
MLRVPVISPDGKPLMPTKASRARRWLLCGLAVVYPNDLNVFAVQLVNQPSGNQTQDIAIGIDPGKMFSGMAVQSSKITLWTGHLILPDKKVRERMDTRRMMRSRSVGFAEKTRRSRRIDRKVAYSQRSHRQKRFSNRRVKRVPPSIRANRQLENRVTKELCFLYPVNVIVYEVVKARGSKGFSPVMIGQYWAISQLEQIAPVIQKQGWETALKREALGLIKDKTDKSQQTVNTHAVDGIALAATHFFRRKNYYHRNGKLSVPKNCDVTNAVFSVIRRAPISRRQLHLLQFSKGGKRRKYGGTTTSHGFRKGDYVEAVKAGITYRGWVSGETVRQVSVSDVNWKRIGQFTARKVRLLKRSTGLIVNH

SEQ ID NO: 935 - protein, 358 aa, Moorea sp.
MLRVPVISPDGRPLMPTKASRARRWLNQGLAVIYQNDLNVFAVELVNQPSGEQIQDIAIGIDPGKMFSGVAVQSEKATLWAGHLVLPYKKVRDRMDTRRMMRKTRRSRRINRKVPYSQRSHRQKRFSNRVAKKVPPSIRANRQLEQRVAKELSLLYPVKAIVYEVVKARGNKGFSPVMVGQYWSISQLEEIAPVTQKQGWETALKREALGLAKDKADKSQQTVNTHAVDGIALAATHFFRRKNYYHSKGKLSVPKNCDVTDTTFSVIRRAPISRRQLHLLNFRACGKRRKYGGTTTSHGFRKGDYVEAVKAGKTYRGWVSGQTVRQVSVSDINWKRVGQFTAQKVRLLKRSTGLLVNH

SEQ ID NO: 936 - protein, 366 aa, Moorea sp.; identical to SEQ ID NO: 799

SEQ ID NO: 937 - protein, 419 aa, Scytonema sp.
MQKENPRVPVISSSGKPLMPTTASRAKRWIKQGKAKSFWNDLGIWCVQLLVEPSGTETQNIAVGSDPGKRYSGVAVQSSKYTLFMAHLVLMGFTPKQGTAIAGVKEKMAYRSMLKRGRRGRRIDRTKVFKLRNHRQKRFDNRKKNKLPPSIRSNRLLEIRVISELARIYPITVIRVEKVRADVDITSGRKGAKQGLGFSPVMVGQNWMLEQLSQIASVVTVEGWQKNGNGTSQVRKYLNLAKNKTDKALQVPETHAVDAVALAAGYFVQYKPFHTANTHGHLWIGSVAITPALFKVISKPRITRRRLHDAVPSKGGVRERYGGSTTPFKARKGDLIEYSTKTKEGIKKVIGYCSGYTGKNLSLSDAKWSRLGRFANSKCRILTRNTGLVISGTLSPAQLPGLPPYDQASGYGRSTREVS

SEQ ID NO: 938 - protein, 365 aa, Microcystis sp.
MARVPVISKDGKPLMPTKPSRARRWIKEGKAIGKFNDLGIFYVQLTDEPSDNKTQPIAIGIDPGKLFSGIGVQSSLFTLWKGHLELPFKRVKERIDNRCLMRRGRRERRINRQLSFNLRAHRQKRFSNRKQGKLAPSIRANRQLELRVVSELTKIYPITDIYFEYIKTDIDLTSSRKGAKSGKGFSSVMVGQKWAIEQLSQLATVHTRFGWQTSNLRKYLRLEKSKNKAEQSPESHANDGIALACFQFLDYWPFHNSNSHGYDWKGSVKVTNAPFAVIKRPPISRRQLHLMVFSKGGKRRKYGGSTTRHGFRKGDLISSPKGIGYISGDTEKQLSVSDTNGQRLGQIAVSKIQLIRRSNGLIVSR

SEQ ID NO: 939 - protein, 364 aa, Mastigocladus sp.; identical to SEQ ID NO: 276

SEQ ID NO: 940 - protein, 373 aa, Brasilonema sp.
MRIPVVSKDGKPLMPTTPSRARRWVKDGKAIKRWSKLGVFYVQLTVAPSNTKTQPIAVGLDPGKLYSGVGVQSTKSTLLMLHVILPFKTVKDRMSQRAMMRRGRRGRRIDRKIAFHKRAHRQERFDNRKQKKVPPSILANKTLELRVLNEIFKIYPVQNIIVERVMAQGNKGFSPVMVGQLWLLKQIEKQFGLELSTILGWETSNLRKQLGLPKDKQDKSRQVPETHAVDGVTIAASRWIKYGITSINSMGWKGQVAITASQFAIIKRPPVSRRQLHLMVPAKGGLRRKYGGTVTRHGFRKGDYVEATQVAKTCRGWVSGDTEKQVSVSDVSWKRLGQFTAKKVRLIQRSTGLIVLSTRKVSNLLPPLGVGLT

SEQ ID NO: 941 - protein, 388 aa, unidentified
  REGION 1..388: note = Ga0315284_10111608
MKNQQTTNGLQVPVDASPVHCSTGCAQADGVTSVASKPVRQPRRENTRGRRRGRLSTHSVFVLGMDGQPLTPTTPSKARKLLKGGQAKKCWSKFGTFGIQMLVPTRTETPLTVLGYDGGTKFEGIAVVSGRENPLAVKLDLPDKKNIVRKMKERRVLRRARRYRNCRRRLARFDNRSRKGFIAPSQRVVVGSRLKVLGECFRLYPITAVGNEDVRFNHKTHRWGANFSTVEIGKAKVKAFFGNHGAQVKDFRGFETQELRKKFGYQKTSDKSADKFNAHCSDALALACEVGLGLRVEPGCFLVVDDTYRPVRRRLHDSQPAVGGVRADYSRGTVLGLRKGLLIGTPRGKQGQLCGTNRGSYRYYNEQKQRQESAKLAWVSTCLVTRKE

SEQ ID NO: 942 - protein, 381 aa, Scytonema sp.; identical to SEQ ID NO: 3

SEQ ID NO: 943 - protein, 373 aa, Microcystis sp.; identical to SEQ ID NO: 693

SEQ ID NO: 944 - protein, 344 aa, Stanieria sp.
MYIQLGLIAMYVPVVDKNQIPLMPTTSTRAKRWIKSGKATGFWKRGVFCVRLNIEPSNRNYQPIACGVDPGSKREGYTVKSKAHQYLNIQATTVDWVNEHLKTRREMRRARRFRKTPCRQPRANRLINKFCLPPSTKSRWQWKLRLCSWLSKMFPITTFVIEDIKAKTWGGKWGKSFSPLQVGKDWFYSELAKLAEVHTLQGMETKQIRDELGLKKTKNKLAETFEAHCVDSFALAYSVVGGNSLPKNTNLLIVVPLRFHRRQLHRLEHAPGAIRSPYGGTMSAGFKRGSLVKHPKYNLCFVGGSSKGRVSLHSVETGKRLCQNAKPQDIKFLTYNTWRTKYAN

SEQ ID NO: 945 - protein, 370 aa, Aphanizomenon sp.; identical to SEQ ID NO: 288

SEQ ID NO: 946 - protein, 422 aa, unidentified
  REGION 1..422: note = Ga0315280_10064331
MVAAMQTLTRRLGESRVSGVADYKNARVRDLALDNSAESLDATTDREASLSPPCNVEGRSTLTGEPVIGRVPVVSANGKPLMPCGPSKARKLLEKGLAEKCWSKLGQFYLRLKFDPKSELNKGQQVCLAADAGSKWDGVAVLSKQGVLTSGMLVLPSKVADKLKRRRQMRRARRYRKTPRRAKRFDNRRRPDGWIAPSQKAKVDFRIKVVDELCKLYPVSQFAVEDVRFNHYRKRWGKHFSTVEIGKTMFYKHLRKFGDLSLYTGVQTAEWRRKLGLPKNYRKNSLTWDSHAVDAIAMGCAKIGCENPYPPEFWVWKRFEYTRRQLHRLEPDKGGVRRRYGGSWSIRPFKKGDVILWHGRLARVGGFMDGKVSLHSFGLRNKRLTQNAIPNECTKLFNQQIFNKSEQPQFLPSINAGVSLEV

SEQ ID NO: 947 - protein, 365 aa, Microcystis sp.; identical to SEQ ID NO: 604

SEQ ID NO: 948 - protein, 335 aa, unidentified
  REGION 1..335: note = Ga0315277_10008377
VIPVLSKQNEPLMPTTSSRARRWIRDRLATPFWKKGVFCVRLNVDPSATYKQEIVCGIDPGSKWEGMTLKSKAHTYLNVVNDATTWVKDAIETRREMRRGRRFRKTPCRKNKGNRSTLSKDGRLPPSTRARWGTKLRLVHIWRSIFPISGYVIEDIAAITKPGQRKWNRSFSPLEVGKNWFYDELRKLGTVVTKEGWETKNLRDALGLQKSKSNQYAFKAHCVDSWVLANSVVGGHTKPDNIQVLCMTPLRFKRRQLHKLQPAKDGVRRREGGTRSLGSKKGSLIVHPTYKLCYLGGNMNGRLSLHSLETGERLTKTAKLEDCKLLGYNSWRWTR

SEQ ID NO: 949 - protein, 365 aa, Microcystis sp.; identical to SEQ ID NO: 170

SEQ ID NO: 950 - protein, 391 aa, Okeania sp.
MIRVPVQNPDGSPAMPTKASRARRWVKEGKATGHWNDAGLYYVRLVAEASGRETQKITVGCDPGKNYTGIAVQSARFTLYSAHLVLPFERVKERLGSAVIKQGKVIKNVRGRALQRRVRRGRKINRKIPFNQRAHRQKRFDNRCKKGKLAPSIRASREMEIRVMTELSKIFPITTIVYELVKADVDLTSARKAARSGKGFSPVMVGQNWCVEKLKSIARVKTVYGWQKNKNGTSQIRQHLGLKKLKDKKAQVPESHAVDGIALAASEFVRYGVTPRKNCDIYGWKGPINITPWIFRVITRPAYFRRALHFDNVEKGGVRKRKGGSITPFNQRLGDKVLAEKAGKTYTGWIGGFTNAKNKNVSVYDHNWKRIGQFSPKKVQLIRRSNKLCVV

SEQ ID NO: 951 - protein, 336 aa, unidentified
  REGION 1..336: note = Ardenticatenales bacterium
MQYVPVQSSTGKPLMPCHAARARELVRKGRAVGRFNKGIYYIHLLDRAEGEVQPLAVGVDPGSQREGFTVKSEAHTYLNVQAEAVDWVGQHIEVRKVLRHGRRGRKTPYRKQRQNRAQGGIPPSTKARWQLKLRVLQWLAALYPISIVVVEDIAAVTKAGKRRWNQSFSPLEVGKAWFYSAVEKMAELWTFQGHQTAEMRHAMGLTKSKQKLSAAWEAHCVDSFVLATIVIGGPIEPDNKEMLILVPLRLHRRALHRANPQKGGVRPPYGGTKSGGFKRGSWVKHPKWGVCYVGGASAGKGGISLHSLRTGKRLTQSAKPEACHFLCHASWRVFHV

SEQ ID NO: 952 - protein, 356 aa, unidentified
  REGION 1..356: note = Clostridia bacterium
MANKPNEQPRVPVVSMDGKPLMPTTPARARKMMRDGVAKPRRNKLGLFFIQMARPVGEKTQPMALAVDPGAKYDGMAVASHEQIELKAMLFLPDDVPKKMETRRNLRRARRYRKAPRRPKRFDNRRKKGYWLAPTQRSKVEARLKVVREIRKIYPIKLIITEDVRYNHYKFRDGKYFSTVEVGKTLTYREYRKLAELRLVEVSDTDAWREQFGLRKQTDKKWEQVLETHANDAVAMLMGVAGCKDSPSAPFFVWRRLRYARRSLHRQNPQKGGVRPRFGGTASGGFFRKGDWVEAEKAGKVYRGWVCGLPTGTTNLVGIADADGKRIGQFTPKKVRLLARSTGFSWKEGSGIPPTA

SEQ ID NO: 953 - protein, 388 aa, Symploca sp.; identical to SEQ ID NO: 680

SEQ ID NO: 954 - protein, 390 aa, Chamaesiphon sp.
MLLKTGHGLLGGRRDSKQEIGLYQIMQRIPVQNPNGSPAMPTKSSRARKWLESGKAIGKWSDCGQFYLQLTTEPSGYATQDIVIGIDPGKLYSGIGVQSAKFTHYTAHLILPFQTVRDRMDVRRLMRRGRRGRRIDRKTSFAKRAHRQKRFSNRRTSRLAPSIRANRQLELRIVAELNQLYPVTEIRYEYVRADVDLTSGRKRARSGKGFSAVMVGQRWMLQQLKRFAPVVAIEGWQTASIRRYLGLEKNKTDKSKPEFATHAVDGVAIAASGFIQYREWHGANERGSNWFGSVEITSATFKVVRRPPYSRRQLHLMIPAKGAVRRKYGGTTTRHGFRKGDLVNSPKGIGYVSGDTHKQISVSDSNWKRLGQITASKVTLLRRSTGLVVA

SEQ ID NO: 955 - protein, 365 aa, Scytonema sp.; identical to SEQ ID NO: 24

SEQ ID NO: 956 - protein, 346 aa, Cyanobacterium sp.
  VARIANT 346: note = Xaa can be any naturally occurring amino acid
MFVPVVDSNQRPLMPTTPSRARRWIKSGKATGFWKRGIFCVRLNVEPSNRNTQPIAVGIDPGSKREAFSVKSQAHTYLNILAHAVDWVKDAVETRRNMRRTRRGRKTPCRQPRANRLVNTQRLPPSTKARWQWKLRICQWLTKMFPVTVFVVEDIKAKTWKNGKRWNASFSPLEVGKSWFYNQLRQLGIIETKSGLETKELRDSLGLKKTKNKLAEKFEAHNVDSFVLANWYTGSHEKPDNTQLLVAIPLRFHRRQLHRLEHAPGSVRPRYGGTISAGFKRGAIVCHKKHGICYVGEFMDSPTKKDKKRQVISLHSLETGKRLTQNALTIDTKFLTTPGELDMLPX

SEQ ID NO: 957 - protein, 374 aa, Moorea sp.; identical to SEQ ID NO: 295

SEQ ID NO: 958 - protein, 340 aa, unidentified
  REGION 1..340: note = Candidatus Poribacteria bacterium
MFVPVTSQTGQKLMPTRANKAGMLIKKGLATPYWSNGIFCIRLNYATEDEYTQDIVVGVDPGSQKEGFTVKSESHTYLNVQADAHSGVGKKVEKRRELRRERRSRKCPNRKNRTNRLANRARIPAGTRARWDWKLRILEWLSKLYPVTHVCVEDIKARTIERAKKWNTSFSPLEVGKQWFYTEIRKRWELRTLQGWQTQEIRDRLGLKKSSKKLAETFDAHCVDSWCLAYHTVAGGSIPDNTTLFCISPIPIRRRELHRQNPQKGGRRPRYGGTTFNGLVKNTLVKHVRHGLTRISGFGKAGISLYSLEGKRLCQNAKISDCKVLTRLNFNYRSGVSSPT

SEQ ID NO: 959 - protein, 339 aa, Microcystis sp.
  VARIANT 100..133: note = Xaa can be any naturally occurring amino acid
MARVPVISKDGKPLMPTKPSRDRRWIKEGKAIGKFNDLDIFYVQLTTESSNNKTQPIAIGIDSGKLFSGIGVQSSLFTLWKAHLELPFKRVKERIDNRRXXXXXXXXXXXXXXXXXXXXXXXXXXXXXXXXXXDIYFEYIKADIDLTSGRKGAKSGKGFSSVMVGQKWAIEQLSRLATVHTRFGWQTSNLRKYLRLEKSKNKAEQSPESHANDGIALACFQFLDYLPFHNSNGHGYDWKGSVKVTNAPFAVIKRPPISRRQLHLMVFSKGGKRRKYGGSTTRHGFRKGDLVSSPKGIGYVSGDTEKQLSVSDTNGQRLGQMAVSKIQLISRSNGLIVSH

SEQ ID NO: 960 - protein, 369 aa, Planktothrix sp.
MRVPVLSASGQPLMPTKPSRARRWLKAAKAKVVYNDLGIFQVQLIEYPKGERTQPIAVGIDPGKLYTGIGVQSAKFTLWLPHLQLPFKTVRERMEQRRMMRRGRRGRRINRKISFDKRAHRQQRFDNRRQRKVPPSIRANRELELRVIGELSSIYPLTDVVYEIVKAVGDKGFSPVMVGQKWQLKNLEKYGEVKQYEGWQTANTRCFLGLEKQKHSKGDAIPATHAVDGTALACQAFIRYGIVDRQTMGWIGEVRITPAPFTVIRRPPICRRQLHLMVSSKGCIRRKYGGSVTRHGFRKGDLVMATQGSKTHQGWVSGDTEKQVSVSDRNWKRLGQFSKNKVRLVQRSTGLIVLPNRRLSNLMASNHQI

SEQ ID NO: 961 - protein, 348 aa, unidentified
  REGION 1..348: note = Anaerobic digester metagenome
MRVPVLDTHRRPLMPTTPKRARLLLKQGKARPYWNKLGIFCIILTYDVQPDNQQLVVGIDPGSSFEGWSVVGTKETVLNGMSEAPKHVTKAVETRRTMRRARRHRKCWRRPARFNNRLSGRKFIPPSTFARWNAKIRIIEQLQKILPITDVVVEDVAAVSKKNCRRWNKNFSPLEVGKRWFYATIQALGLDLYLRAGYETKELRDRFGLKKSSQKDKKTFSSHAVDAWVMAADISGAEHPSEIGLYYWTPIRVHRRQLHRFQPEKGGIRKPYGGTRSMGLTRGTLVRHIKYGLTYIGGTLKNRVSLHSFGTGKRVTQNARIEDCTILTRIAWRTQWYAGTGRRHSSPA

SEQ ID NO: 962 - protein, 330 aa, unidentified
  REGION 1..330: note = Ga0315273_10032131
MSAHNVFVLGKDGIPLTPTKASKARKLMEGKVAKPVWNKFGQFGIQMLVNTRNETPNTALGIDNGTKFEGYSIVCDKENNLNAMWKLPDKKQIVRKLEERRILRRARRFRNCRRRECRFDNRNRDGFIAPSQLVMVNSRMKAIKEFFKTYPIKIVGIEDVRFRKHPKGNNYSTVEIGKSKIYEFLENHAILHKFAGWQTQKLRKLYGYRKSYVDKSAEKFSTHCCDSLALATALTAKKHIDNGKFIIVDDSYRPVRRRLHDTQFSKGHIRYPYSQGNFKGVRKGTISSHGLIGGGRYNGFRLYNWKGIRIFKTMKKVNWLSKKFFMKELI

SEQ ID NO: 963 - protein, 344 aa, Microcoleus sp.
MFVPVVNSENRPLMPTTPSRAKRWIKLGKATPFWKKGVFCVRLNVEPSNTNRQPIAVGIDPGSKREAFTVKSQAHTYLNVQTHAVDWVKDHVEVRRNMRRARRFRNTPCRQNRANRLVNKTRIPPSTKARWQWKLRIVNWLTKMFPVSAFVVEDIKACTWKNGRKWNVSFSPLEVGKHWFYSELRKIAHLETKSGNDTYELRQSLGLHKSKQKLSNKFEAHCVDSWVLANWYVGGHTESDNIKLIEVVPLEFHRRQLHRLQHAPGHIRSRYGGTISAGFKRGSIVKHPKYGFCYVGGWALSPTKKDPGRKTISLHSLNTGKRLTQNAVPMDCKFLSYNSWRIAN

SEQ ID NO: 964 - protein, 379 aa, Leptolyngbya sp.
MRIPVVDGDGTPLMPTKPARARKWLEQGKAVKRWSDTGVFYVQLVASSSGTETQAVVVGVDPGKLYSGVGVQSAKATLFMAHLILPFETVKKRMEQRAMMRRTRRGRRINRDVPFAQRNHREKRFDNRVGRKVPPSIKANRQLELRIVSELCRILPITKIVYEYVKARGNGGFSPVMVGQRVMLTWLAKLAPVVTRFGWETANMRTHLQLEKTKNKKAQTPAAHAVDGVALACSEFTSYEQYHRAGEDGAVWQGAVQLTDALFKVIRRPPTSRRQLHLFQPAKGGKRRAYGGTVTRHGLRKGDLVSAEMAGRKYVGWISGDTAKQVSVSDINWKRLGQFTASKVQLIQRSTGLLASGASSPTQPALIPPTAESGGLSGN

SEQ ID NO: 965 - protein, 406 aa, unidentified
  REGION 1..406: note = uncultured Bacteroidetes bacterium
MRKKQVKQKTTLPQIPRNRGRSKGTEPLVHGSTEKVVDASQIDEITSGQRGRDAENREGGLTANPSKTVFVPVKDSAGNELMPTTPSRARRWIKSKKATGYWNHGIYCVRLNVEPSARNTQQTALGIDPGSKWEGYTVKSKAHTFLNINADAVTWVKENEETSTNLRRTRRNRSTPCRKPKSNKGKHSAKFIPPSTKARWNKKLEVSKWLRKMFPITDTVVEDVAAKTMKNGRKWNKSFSPLEVGKAWFYKELSKVTNLTTKSGWETKLMRDELGLKKSGSKKAKIFEAHAVDSWVLANSVVGGHAKPDNTNLLLLKPLRFFRRQLHVQNFAKGGLRKNYGGTISEGFKRGSLVTHPKYGLCFVGGASKGKVSLHDIKTSERLCQNANPADIKFIAYNYFTANRAA

SEQ ID NO: 966 - protein, 339 aa, Tychonema sp.; identical to SEQ ID NO: 34

SEQ ID NO: 967 - protein, 371 aa, Dolichospermum sp.; identical to SEQ ID NO: 156

SEQ ID NO: 968 - protein, 332 aa, unidentified
  REGION 1..332: note = Ga0373625_0055246
MFIPVVNLKQEPLMPTTPSRASRWIKSGKATPFWKKGIFCVRLNGEPSNQEVQEIAVGIDPGSKKEGFTVKSLAHTYLNIQADAVTWVKDAVEVRRNMRKSRRFRNTPCRANRMNRKQQGGTPPSTKARWQWKLRICNQLKKIFPIEVFVVEDIKARTWKGGKKWNQSFSPLEVGKNWFYTELEKLGKVELKRGYETKKLRDLLGLKKTGNKIAEMFEAHCVDSWVLASSWVGGKVPDNKQLLLITPLRFHRRQLHYLQPEKGGIRKRYGSTRSLGFKRGSIVKHPKYGITYVGGNQNNRISLHSLKTGIRLTQEIRVEDCKFLTYNSERMR

SEQ ID NO: 969 - protein, 369 aa, Planktothrix sp.; identical to SEQ ID NO: 755

SEQ ID NO: 970 - protein, 374 aa, unidentified
  REGION 1..374: note = Synechococcales cyanobacterium
IQRIAVIDPEGKPLMPTTPKRARKWVESGKAVGRWSDINVWYVQLTAEPSGAKTQPIAIGIDPGKLYSGIGVQSSQFTLFLAHLVLPFKRVKDRKEFQKLMRRGRRGRRINRKVAFNLRAHRQARFSNRRQKKVAPSIRANRQLELRVVKELLVLFPASSIVYEYVKADVDLTSGRKKARSGKGFSAVMVRQKWMLSELSKLGPKVKTQLGWQTAQIRNHLSLEKTHNKKEQSPASHAVDGVALASSEFVGYRKHYKQGVDGADWFGAVQTSLDGLFRIIKRPPISRRQLHLAQPVKGGVRRKYGGTITRHNGLRKGDFVRAVKAGKEFFGWVSGDTKTQVSISDSNWRRLGQFTASKVELIHRSTGLLAAHCA

SEQ ID NO: 971 - protein, 344 aa, Nitrosococcus sp.
MFVPVVDSHNQPLMPTKPGRARRWIKEGKATPFWKRGVFCVRLNTEPSDRELQPVAVGIDPGSKKEGLTVKSDTHTYLNIQADAVTWVKAAVEVRRNMRKARRFRKTPCRKNRFNRARSPFPPSTKARWQWKLRLCQWLAKLFPLECFVVEDIKAHTQGGRRWNKSFSPLQVGKRWFYGELKKIAQLKTRQGYETKALRDGLGLRKTKRKLGEVFETHCVDSWVLANGWTGGHTYPDNKQLLCITPLRFHRRQLHRLQFPKGGIRKPYGGTPSHGFKRGSLVKHSKWGLAYVGGFLRDRISLHAVASGKRLCQNAKPVDCQFLTFNTWRTRALPLPAEAGSLRA

SEQ ID NO: 972 - protein, 333 aa, unidentified; identical to SEQ ID NO: 731
  REGION 1..333: note = Ga0373626_0020143

SEQ ID NO: 973 - protein, 365 aa, Microcystis sp.
MARVPVISKDGKPLMPTKPSRARRWIKEGKAIGKFNDLGIFYVQLTDEPSDNKTQPIAIGIDPGKLFSGIGVQSSLFTLWKAHLELPFKRVRERLDNRRLMRRGRRKRRINRQLPFSLRAHRQKRFSNRRQGKLAPSIRANRQLELRVVSELTKIYPITDIYFEYVKADVDLTSGRKGAKSGKGFSPVMLGQKWAIEQLSQLATVHTRFGWQTSNLRKYLRLEKSKNKAEQSPESHANDGIALACFQFLDYLPFHNSSGHGYDWKGSVKVTNAPFAVIKRPPISRRQLHLMVFSKGGKRRKYGGSTTGHGFRKGDLVSSPKGIGYVSGDTEKQLSVSDTNWKRLGQMAVSKIQLIRHSNGLIVSH

SEQ ID NO: 974 - protein, 342 aa, unidentified
  REGION 1..342: note = Candidatus Poribacteria bacterium
MFVPVVDKSQNPLMPTKPSRARKWIRDKKATPFWKNGVFCVRLNVNPSDRYFQEICVGIDPGSKKEGITVKSEAHTYLNVQADAHSKVGKKVEKRRELRRSRRSRKCPNRKQKKHNLSNRKRVPAGTRARWDWKLRILEWLSKLYPITHVCVEDIKARTIERAKQWNQSFSPLEVGKQWLYSEVQKRWELLTLQGWETKEIRDRLGLKKSPKKLAETFQAHCVDSWCLAYHTVGGSGIPDNTDIFCISPIPIRRRELHRQNPQKGGKRPRYGGTVLGNGLVKNTLVRHIKYGLTRLSGINAKGLFSIYSLDGKRLTTSAKRTDFQVLRRLNFNYKGGVSSPC

SEQ ID NO: 975 - protein, 351 aa, unidentified; identical to SEQ ID NO: 180
  REGION 1..351: note = Oscillatoriales cyanobacterium

SEQ ID NO: 976 - protein, 360 aa, Moorea sp.
MLRVPVISPNGQPLMPTKASRARRWVKEGKAIIYPNALDIFAIQLVAEPSGDETQSIAVGIDPGKMFTGLAVQSAQATLWTGHLVLPYPKVRDRIDTRRMMRRTRRSRRINRKIPYDQRAHRQKRFENRLAKKLPPSIKANRDLEFRVVSELFELYPISQIVYEVVKAKGTKAFSPVMVGQYQSIQRLEATFTVPVTQKMGWETSMARKGLGLTKDKTDKSRQTAETHANDGIALASFPFRKVKTQYYRNGKVVTPTVAVVTLAPFAVVSRPSISRRQLHLLQFSKGGKRRKYGGTTTRHGFRKGDYVEAVKAGQTYRGWISGDTATQVSVSNSNWKRIGQFSARKVRLLKRSTGLLVNY

SEQ ID NO: 977 - protein, 363 aa, Mastigocladus sp.; identical to SEQ ID NO: 595

SEQ ID NO: 978 - protein, 396 aa, Coleofasciculus sp.; identical to SEQ ID NO: 640

SEQ ID NO: 979 - protein, 211 aa, Richelia sp.; identical to SEQ ID NO: 331

SEQ ID NO: 980 - protein, 351 aa, Chroococcidiopsis sp.
MYVSKRKRGCPAHWSCVPVVDRNQRPLMPTTPARAQRWIESSKATPFWKRGIFCVRLNVEPSSRNTQPIAVGIDPGSKREAFTVKSQAHTYLNILAHAEDWVKDAVETRRNMRRARRFRKTPCRQNRANRLVNTQRLTPSTKARWQWKLRICQALCKIFPITAFVVEDIKAKTWKNSKKWNTSFSPLEVGKAWFYNQLRQLGILETKSGLETKGLRDSLGLKKTKNKLAEKFEAQNVDSFVLANWYTEGRDKPDNTQLLVVIPLRFHRRQLHRLEHAPGHIRSPYGGTMSLGFKRGSLALHPKYNLCFIGGSSKGRVSLHSVETGKRLCQNAKPQDIKFLTYNTWRTRYVS

SEQ ID NO: 981 - protein, 344 aa, unidentified
  REGION 1..344: note = Burkholderiaceae bacterium
MFVPVVNSENKPLMPTTNARAKRWIRSGKATPFWKKGVFCVRLNAEPSNHNYQPIAVGIDPGSKREGFTIKSKSHTYLNIQTHAIDWVKDHVEVRQNMRRARRFRNTPCRQNRANRLVNKNRLPPSTKARWQWKLRIVNWLTLMFPISTFVVEDIKARTWKNGRKWNVSFSPLEVGKHWFYDLLIKIAHLEIRSGNDTYELRQKLGLKKSKQKLSNKFEAHCVDSWVLANWYVGGHIQPDNSSLIEIVPLEFHRRQLHRLQYSTGHVRSRYGGTISVGFKRGSIVKHPKYGFCYVGGWQEPPTKKDPYRKTISLHDLKTGKRLTQNASPADCEFLSYNSWRIAN

SEQ ID NO: 982 - protein, 353 aa, Trichocoleus sp.
MRIPVVSVNHQPLMPTKPRRARKWIREGFAVAKFNDLGQFYVQLVDEPSGSETQPIVIGIDPGKLYSGIGVQSSKVSLFTAHLILPFQKVKDRMEQRAMMRRGRRNRRINRQVAYSQRAHRQKRFSNRKQRKLPPSIRANRQLELRVVKELCKVLPITGIVYEIVEAKGSKSFSPVMVGQKWALTQLAEFAPVETRKGWETSQLRTQLGLHKQKHQKGDAIPATHAVDGIALACSAFIKYESFHTAKAYGHQWTGEVSVTVASFKVIRRPPISRRQLHLMVPGKGGIRRKYGGSTTRHGVRKGDLVSSPKGIGYVSGDTEKQVSVSVANWKRLGQISSSKVQLIRRSNGLIVA

SEQ ID NO: 983 - protein, 346 aa, Scytonema sp.; identical to SEQ ID NO: 36

SEQ ID NO: 984 - protein, 379 aa, Crocosphaera sp.; identical to SEQ ID NO: 255

SEQ ID NO: 985 - protein, 366 aa, Richelia sp.
MRVPVINYDSEPLMPTKRSRARRWIKEGKAIGKWSKLGIFYIQLLTPASGDKAQDIAVGIDPGKQFTGIAVLSHKSTLLTIHVDLPFKNITKRMAQRAMMRRCRRGRRINKKIPFNQRSHRQTRFDNRRQKKLPPSINANKQLERRILGLIIKLFPVSKVVYEVVKASGNKGFSPVMVGQIDQCKKLSKLDYLFDFKTLQGYETYQIREHLKLEKEKSDKSLKIPQTHAVDGIALAASNWMNYGIVDNNSMGWRGEITLTDSIFLVISRPPISRRQLHLMVPNKGGKRRKYGGSVTQHGYRKGDNVEAVKANKTYRGWVSGDTNTQVSVSNANWKRLGQFSKNKVRLIRRSTGLIITSRKYLAKGT

SEQ ID NO: 986 - protein, 341 aa, unidentified
  REGION 1..341: note = Ga0315280_10060196
MPCKPSKAKKLLAKNLAEKCWNKLGRFYLRLKFDPQSEPNKNQQVCLAVDTGSKWDGMAVVTTKQVLTTAELVLPKGIAGKHGKIETRRRMRRARRYRKTPRRAKRFNNRRRPKGWLAPSQKAKVDFRIKIVDELRRLYPINRFVVEDVRFDHYRKRGGKSFSTVEIGKTKFYKHLRSLGNLILYTGAETAERRKKLGLPKNSRKSALKWDAHASDAIAIGYAETGCQHPSPPEFWVWKRFQIARRQLHRLEPSKGGVRRRYGGSSSIPPFKKGDVVAWRGRLFRVGGFTGKHISLHAFTLKNERVTQKARSADCTRLFNQKIFESQFIPRINSGVSLGDS

SEQ ID NO: 987 - protein, 365 aa, Microcystis sp.; identical to SEQ ID NO: 336

SEQ ID NO: 988 - protein, 364 aa, Pleurocapsa sp.; identical to SEQ ID NO: 560

SEQ ID NO: 989 - protein, 408 aa, unidentified; identical to SEQ ID NO: 401
  REGION 1..408: note = Ga0373625_0205637

SEQ ID NO: 990 - protein, 405 aa, unidentified
  REGION 1..405: note = Ga0315285_10000720
METTTRTKLKERQNAPLILPSSRESFNLASLENSVNNRGGSKLCSHSLSGYNLQMQSCLSAHKIFVIGIDGKPLTPTTPCKAKKLLKSKQAVPVWNRFSQFGIKMLVETRKETPKTVLGVDFGTKFEGYTLVCDKENSLAVMWKLPDKKKIVAKLEERKDLRRARRFRNCRRRECRSDNRSKKGFIAPSQKVIIQSRIKALTEFFNCYPVDTVALEDVCFNHRNKKWGKNFSTIEVGKHFINSWIRARAGLQFFQGYDTEACREQYGYKKSRDKGAEVFNSHCSDALAIATDISAKIHIVQGNLVIVDDTYRAVRRKLHDTQPAKKGIRANYSTGNFRRVRKGTVCEHGQIVGGTKKSYFIRNQENKRIGRTNIDWLSHSFKNYEVKSGNSSLQQDCSVSLPPII

SEQ ID NO: 991 - protein, 408 aa, unidentified; identical to SEQ ID NO: 349
  REGION 1..408: note = Ga0315284_10006726

SEQ ID NO: 992 - protein, 358 aa, Moorea sp.; identical to SEQ ID NO: 264

SEQ ID NO: 993 - protein, 336 aa, unidentified
  REGION 1..336: note = Chloroflexia bacterium
MQYIPVLSATGERLMPCHAARARQLIRNGKAVKRFDRGICYLVLTKRETGETQPIALGIDPGSKKEAYTLQTEQHTILNIQADAVTWVKEHVETRRQMRRTRRYRKTPCRANRKNRARGGIPPSTRSRWGWKVRIARWLARYYPITAIVIEDIAAITLEGKRRWNASFSPLEVGKLWGYDQLDQIAPVQAVPSHYTKSLREQAGLKKSRDKTSDQWDAHCVDSFVLASYAVGGPSKPTSINMLYLVPLRFHRRQLHRLQPEKGGVRKPYGGTRSLGLKRGSWVRHPKWGVAYVGGTYKGRISLHNMQTGKRLTQTVHVSDCQMLCTASWRIRAKAV

SEQ ID NO: 994 - protein, 369 aa, Planktothrix sp.; identical to SEQ ID NO: 147

SEQ ID NO: 995 - protein, 285 aa, Symploca sp.; identical to SEQ ID NO: 694

SEQ ID NO: 996 - protein, 365 aa, Microcystis sp.; identical to SEQ ID NO: 938

SEQ ID NO: 997 - protein, 391 aa, Okeania sp.
MIRVPVQNPDGSPAMPTKASRVRRWVKQGKATEHWNDAGLYYVRLVAEPSGRETQKITVGCDPGKKYAGIAVQSAKLTLYTAHLVLPFDRVKERLGSAVIKQGKIIKNVRGRALQRRARRGRRINRKVPFNQRAHRQKRFDNRTKKGKLSPSIRASREMEIRVITELSKVFPISKIVYELVKADVDLTSGRKGARSGKGFSPVMAGQYFCVEKLKSIAPVKTIYGWQKNGNGTSQIRKYLGLTKIQDKKAQTPESHAVDGIALAATEFIRFGIIPRMNKDIYTWKGSVNITQSVFRVITRPAYFRRALHFDNAEKGGIHKRKGGTITPFYVRYGDKVIAEKAGKTYIGWVGGFADAKAKNISVYDVNWKRIGQFSPKKVKLIRRSNKLCVV

SEQ ID NO: 998 - protein, 346 aa, Leptolyngbya sp.; identical to SEQ ID NO: 238

SEQ ID NO: 999 - protein, 339 aa, unidentified; identical to SEQ ID NO: 598
  REGION 1..339: note = Ga0315273_10103216

SEQ ID NO: 1000 - protein, 352 aa, Chloroflexi sp.
MRVPVTDCRGVPLMPCTPPKARILMKEGKAVPKRNKLGLFYIQLTYSQEPDNQPLVVGIDPGSSFEGFSVVGSKDTVLNLMVEAPTHVKDAVEVRRNMRSARRHRLWRRPCRSNNRLKGKKRIPPSTRSRWEAKARIVTQLQKILPLTHVVVEDVQAETKPGKRNGRTKTGRVKKITRKWNASFSPVQVGKEHLYNLLRGMGLILSLVQGYETKALRDKYGLKKVSTKAKKVFSSHAVDAWVMAANVSGAVAPTCQRLWYVVGATLHRRQLHVLQPGKGGVRKPYGGTRSLELKRGTLVKHPKYGLCAVGGFDRKTKHVSLHHYRSNKRLTQQGKLQDLKTLAWVSFRSYLV

SEQ ID NO: 1001 - protein, 344 aa, unidentified
  REGION 1..344: note = Ga0315284_10065608
MTQKRVPVLDAQKHPLMPTTPARARLLLDRGQASAYWSKLGIFCIILKKNVIPNNQNLAIGIDPGASFEGWSIVGTKDTILNGTSETPKHVKKVIESRKTLRRARRFRNCWRRPARFNNRNRGKKTLAPSTFARWNAKIRILNHLSTLYPISMVAVEDIAAPTKKGKSKRNENFSIIEQGKQWFYNKIKKKYPLVTYAGYETKKYRDFYRLYKSPKKDEKSFSAHAVDAWVLAATLVGAATPTDRCLYYWTPIITQRRNLHVANPIKGGIRKRSGGTRSMGFTKGTLVTDKYNNIRYIGGHSDKGISLINPYSVKPDKRTTRSAKPSDLKILTRIAFTTDRIVE

SEQ ID NO: 1002 - protein, 365 aa, Microcystis sp.; identical to SEQ ID NO: 867

SEQ ID NO: 1003 - protein, 342 aa, unidentified
  REGION 1..342: note = Candidatus Poribacteria bacterium
MFVPVKTKDGQQLMPLHAARARKLVKRGEATPYFNNGIYCIRLNKEPSDRATQKIAVGVDPGSKKEGFTVKSETHTYLNIQADAHSKVGKKVEKRRELRKGRRSRKCPNRKNRTNRLANKQRIPAGTRARWDWKLRILQWLSKLYPITHVCVEDIRARTLKNTKKWNMSFSPLEVGKSWFYTEIEKRWQLITLQGWETKAIRDRLGLKKSSKKLAETFDVHCVDSWCLARHIVGGANIPDNTSIFCISPLPIARRNLHREVPKKGGIRDRYGGTVLKNGLIKNTLVRHIKYGLTRLAGINAKGEFSIYSLDGKRLTTHGKQSDFKVLKKLNFNYRSGVSSPA

SEQ ID NO: 1004 - protein, 373 aa, unidentified
  REGION 1..373: note = Ga0315295_10027354
MPVSVEGLNTARLSQGPLATNLGNKGNRMIFSVPVVDQSGTPLMPTYLRRAEGWVRTRKATPFWSRGVWCVRLNVEPSAKHLDPVAVGVDPGSKREAFTIKSKARTHLNVLAHAVDWVKDAVEIRGNMRGGRRFRKAPCREPRFDNRKRKGMPPSTKARWQWKLRIAKWLTRMFPVSGFVVEDVRARTKGRRKWDVNFSPLEVGKSWFYGELKKLAPVITRQGWETKVLRDRLGLRKTHSKLAEKFSAHNVDSFALAWDMVGGDGKPDNESLLVLVPFRFHRRQLHAFQPSKNGVRRPYGGTKSLGFKRGSLIRHPKHGLCYVGGSSKGMLSLHSLTDGRRVCQNAKPGDVSFRGFGSFRFYGKTGAANSSAA

SEQ ID NO: 1005 - protein, 368 aa, Coleofasciculus sp.; identical to SEQ ID NO: 143

SEQ ID NO: 1006 - protein, 339 aa, unidentified
  REGION 1..339: note = Ga0315294_10022559
LFVPVIDKNQKPLMPTKPSRARRWIKEGKATPFWKRGIFCVRLNVEPSALNLDEIVVGIDPGSKKEGYTVKSKLHTYLNLQADAVTHVKDAVEARRNMRRGRRFRKTPCRKNKRNRLGRGMPPSTKARWQWKLRICNWLKKLFPVTSFIVEDIKAKTKGQRRWDMSFSPLEVGKKWFYDELSKLGTLTTKQGYETKELRDLVGLKKSKAKMSDRFDAHCVDSWVLCNSVVGGHVLPDNEKLIKIIPLIFHRRQLHAFQPAKKGVRRPYGSTRSLGLTRGSLVKHKKHGLSYVGGTYKGRISLHGFDGVRLTQSAKVTDCKFLTYNTWRIVNTSPRPEIR

SEQ ID NO: 1007 - protein, 420 aa, unidentified
  REGION 1..420: note = Ga0315279_10047182
MVDKMRTQTRPSGKEAATCGGLRRTSGRLPNPDRFGRTTKCHAGKPAKPAVHGRREILPSVIAGAGVIPQTRVPVVDKAGKPLMPCLAVRARKLLDTGKAVGAWNKLGIFYIRLKVSKEPKNQRLVVGIDPGSKFEGYSVVGTKDTVLNIMSEAPDWVKKAVETRRNMRRARRFRNTRRRECRFDNRLAGTRRLPPSTKSRWDAKLRIVTKLAQIMPLTGAVVEDVKAVTKKGQRRWNVNFSPIEAGKEYLYNGLRGLGLELRLKQGMETKEARDALGLKKIKSKSRPVFSSHCVDSWILAASMSGAKMPTTKNLYYLTPLRLHRRQLHMFEPAKGGLRKRYGGTMSIGIKRGTLVVHLKHGLCYVGGNMDERLSLHSVSTGKRLCQNAKVSDLKTLTRIANNSQFLPALKCGVSLGGFL

SEQ ID NO: 1008 - protein, 361 aa, unidentified
  REGION 1..361: note = Cyanobacteria bacterium sp.
MRVPVISSDEQPLMPTKPSRARGWVREGKAKGFFKDLSQYCVQLLEEPTGTDTQSIAVGVDPGKKYSGLGVQSANYTLWKGHLILPFETVKKRMEQPRMMRRGRRGRRINRKLPYKQRAHRQKRFNHRRGHKLPASIRANRQLEYRVVKELTKVYPICAIYYEYVEAKGDKAFTPVIVGQKFMLQWLEQLAPTHTKLGWETASLRRDLKLEKSRNQGESTPASHAVDGIALASHSFRGMEKINGKNYRGQVWQGEVNLTESPFTVLRRPPVSRRQLHLMVEPLGGVRRKYGGTVTRHGFCKGDYVQASRKDQAFFGWVSGDTKSQVSVSNANWKRLGQFSTNKIRLLKHSTNLVTTAKAVI

SEQ ID NO: 1009 - protein, 419 aa, Scytonema sp.; identical to SEQ ID NO: 937

SEQ ID NO: 1010 - protein, 393 aa, unidentified
  REGION 1..393: note = Leptolyngbyaceae sp.
MQLRVPVQHQDGSPAMPTKPSRARRWVRDGKAIGKWSDTGIYYVQLVNEPSDHKTQPIALGIDPGKSYSGIAVQSAKFTLFLADLVLPFQRVKERLGSAVTKNGKIIKNVRGRTLQRRVRRGRRINRKIAFHLRAHRQKRFSNRRQSKLAPSIKASRQMEIRVATELSKVFPITSIVYELVKADVDCTSKRKGARTGKEFSPVMTGQYWAIEQLNTIAPVSTCLGWQEDGNGTSQIRTYLGLVKDRKNKSVAKPDTHAVDGIALAASQFVSYQRYHRQCEDGAEWVGEVGITPAPFRVITRPEYFRRALHFDNPSKGEVRKRKGGTITPFGYRAGDLVFAQKSGKVYRGWVGGFTDTEKTRNVSVYDHNWHRIGQFSVGKVKLIQRSTKLCVA

SEQ ID NO: 1011 - protein, 365 aa, Scytonema sp.
MQRVPVLDKDGKPLMPTKPSRARRWLQEGKAKIVRNDLNVFCIQLLVEPSGCGTQPIALGLDPGKRFTGVGVQSAKFTLFMAHLILPFSDVTKKMSGRLILRRARRGRRINRKVAFNKRAHHQKRFDNRKQNKLPPSIRANKELELRVTKELVKLFPVTQITYEYVKAKGDKRFSPVMVGQKVMLQWLEKIAPTKIQEGWQTSILRQQLGLAKDKKDKSRQSPETHAHDGVALAASNFMKFEKFQTANSRGHRWRGGITVTSAPFRVIARPNLFRRQLHFENPVKDAPGNRKRKGGTVTPFGFRSGDLVRAEKAGKSYFGWVGGYTQTPKTKNISVYNHNWHRLGQFSPSKVQLIKRSTRLCVAS

SEQ ID NO: 1012 - protein, 391 aa, Hydrocoleum sp.; identical to SEQ ID NO: 267

SEQ ID NO: 1013 - protein, 368 aa, unidentified
  REGION 1..368: note = Candidatus Poribacteria bacterium
MLPKSYINADITIWMGQYKLYGDLQTMFVRVVDKHQNPLMPTKPSRARKWIRDKKATPFWKNGVFCVRLNVEPSNRYFQEVAVGVDPGSKKEGFTVKSEAHTYLNVQADAHDKVGKKVEKRRVLRRGRRSRKSPNRKHKKHTLSNRERVPAGTRARWDWKMRILDWLSKLYPITHVCVEDIKARTIQRAKKWNQSFSPLEVGKQWFYTEIEKRWELLTLQGWETKEICDRLGLKKSSKKLSETFDAHCVDSWCLAYHTVGGSEIPDTTDIFCISPLPIRRRELHRQNPQKGGKRPRYGGTVLGNGLTKNTLIKHVKHGLTRLVGINAKGLFSIYSLDGKRLTTGAKRTDFQVHTRLNFNYKDGVSSPC

SEQ ID NO: 1014 - protein, 346 aa, Leptolyngbya sp.; identical to SEQ ID NO: 238

SEQ ID NO: 1015 - protein, 365 aa, Microcystis sp.
MNRVPVISKDGKPLMPTKPSRARRWIKEGKAIGKFNDLDIFYVQLIIEPSDNKTQPIAVGIDPGKLFSGIGLQSSLFTLWKAHLELPFKRVRERMDSRRLMRRGRRGRRINRHIPFNLRAHRQKRFSNRRKAKLAPSIRANRQLELRVVSELARIYPISDIYFEYVKADVDLTSGRKRARSGKGFSPVMIGQKRAIEQLSQLATVHTRFGWQTSNLRKHLRLEKSKNKAEQSPESHANDGIALACFQFLDYLPFHTSNGHGYDWKGSVKVTNAPFAVIKRPPISRRQLHLMVFSKGGKRRKYGGSTTRHGFRKGDLISSPKGIGYVSGDTEKQLSVSDTSWKRLGHIVVSKIQLIRRSNGLIVSH

SEQ ID NO: 1016 - protein, 338 aa, unidentified
  REGION 1..338: note = Ga0315295_10001383
MLFVPVVDLNQKPLMATTPNRAATWVKSGKATPFWKRGIFCVRLNIEPSARVIQSVTVGVDPGSKKEGFTVKSEAHTFLNIQSDAVTWVKDAVKTRREMRKARRFRTTPCRKPRFNLAKGGLPPSTKARWGWKLRICHWITKMLPIDSFVVEDIKARTTGKRRWDKSFSPLEVGKKWFYEELKKIGRVETKQGFETKELRDTVGLKKSGSKMAETFEAHCVDSWVLANSWVGGHIIPDNKEMLLITPLRFHRRQLHMLQPANGGVRKPYGGSRSLGFKRGSLIKHPTWGLSYVGGTSRNRISLHSLTDGQRLCQNAIPEDCRFLAFNSWRTRLFPAVN

SEQ ID NO: 1017 - protein, 341 aa, unidentified; identical to SEQ ID NO: 932
  REGION 1..341: note = Candidatus Poribacteria bacterium

SEQ ID NO: 1018 - protein, 344 aa, Richelia sp.; identical to SEQ ID NO: 664

SEQ ID NO: 1019 - protein, 398 aa, Coleofasciculus sp.; identical to SEQ ID NO: 608

SEQ ID NO: 1020 - protein, 360 aa, Sulfobacillus sp.
MRIAVVSMQGIPLSPTTPAKARKLLRNGEAIPKRDKLGTFYLQLTTPTGERIPHDTVAGIDPGKRYSGIGVQTPQATLWMGHVVLPFPYVKRRMISRQHSRQFRRYRKTPQRPRRFRHRTGHKIPPSIRANRDLEWRIVTELVKIYPITHVVYEVVKAQGTKSFSPVMVGQQWQMDRLVGVFPLEPRRGWETAQLRFVLGLHKTSKKAQPSPASHAVDGVALAASHFLHYVPFTEKNGDHGRRWEGRCQITPAPFAIIQRPQLFRRALHDQNPIHGGVRERFGGTTTPWGFRKGDLVEGTKAGRTVRGYVSGYTQTRQTRNIAIVDARWKRLGQFVVSKVRLLARSSRLLVSSVSFARCR

SEQ ID NO: 1021 - protein, 404 aa, unidentified
  REGION 1..404: note = Ga0315277_10007795
MLKTTTIEGLQEPEDTPQVFSNSEEPLNSTSLGNATNSSDNSIPFSHFGCGYNNNSVGSMSSNRVFVLSGSGKPLTPCKPRKARKLIEGKVAKPIWNKFGLFGIQMLVETRQQTPKTVLGIDNGTKFEGYSIVSEKDNNLNVMWKLPNKKTIVEKLKERRKLRRAKRFRNCRRREARFDNRNRDGFIAPSQLVIVNSRLKCLKELFKYYPISKVGIEDVKFNHRDNRWGKNFSTVEIGKRMIKDFIINKIGRENYLTFNGFETKELREKNNLNKSSNKSAEHFYSHCVDSFVIASEIVNNSIHTDNILVVDDTYRPTRRRLHDTQFKKGGIREKYSAGNFKGTRKGTICEFGQIVGGTKNNFWIRNLENKRVGKVSTKISWLSHKFKVAIHPPIEIGGLLATEE

SEQ ID NO: 1022 - protein, 365 aa, Microcystis sp.; identical to SEQ ID NO: 336

SEQ ID NO: 1023 - protein, 333 aa, Calditerricola sp.; identical to SEQ ID NO: 642

SEQ ID NO: 1024 - protein, 371 aa, unidentified
  REGION 1..371: note = Ga0373628_0134704
DVVGASQARNPSGGQPRWESTLKGSEGTSLTAGGVSPQWIPVLASIGVPLMPTRPRRARRLVESGRAVGKWKAGIYHIRMLDRDVGEVQPIAVGIDPGSKREGFTVKSERHTYLNILSDAVTDVKDRVEARRNVRRARRSRKTPCRANRENRARGGIPPSTKARWQSKLRIVNILYSLYPVKTWVVEDIKAKTRRGGKRWNISFSPLEVGKGWFYGEMMKRGELALKSGWDTKCMRDALGLVKTNGKMEERFSAHNVDSWVLAHSSVGGNGKSDNESIWRMVPLRFHRRQLHYFQPSSGGIRRAYGGTMSLGLKRGSLVRHPKWGTCYVGGNMGEKISLHQLTDGERVCRSAKKSDLKVLRFGSWRYSKVA

SEQ ID NO: 1025 - protein, 365 aa, Microcystis sp.; identical to SEQ ID NO: 579

SEQ ID NO: 1026 - protein, 370 aa, Calothrix sp.; identical to SEQ ID NO: 574

SEQ ID NO: 1027 - protein, 371 aa, Dolichospermum sp.
MRVPVISVDNTPLMPTKPSRARRWIKCGKAIGKFDKLGIFYVQLLAESSNTETQEIVLGLDPGKLFSGIAVQSKKFTLQMLHLVLPFKTVKDRMDQRSMMRRNRRGRRINRKLSFNKRNHRQARFDNRRGSKLPPSIRANKDLEYRVISLLLQLYPIKTVVIEEVEARGNKGFSPVMVGQRYQISRLSKLINVVLKKGWETSNLRKYLGLHKEKSDKSLQIPETHAVDAVALASSEFVKYQTWEGAKNHGASWIGGVDITESQFTIVRRPPISRRQLHLMTFSEGGNRRKYGGTTTRHGFRKGDFVEATQGSKTFFGWVSGDTEKAVSVSDANWKRLGQCTVKKVKLILRSTSLIITAVKTARVASLSALK

SEQ ID NO: 1028 - protein, 349 aa, unidentified
  REGION 1..349: note = Ga0315285_10061643
PFQSSAESRSGNREGFLVPVVDSNNNPQFPCKCTVAASLIRIGKATPFFKKGIFAIRLNKTIKDSHEKRIVMSIDPGSKRTGITVATEENVILNIQCNAPDWVKGKVETRKNYRRSRRARNTPYRKCRFNREIGCLPPSTKSRWGAHLRILDQLRKIIPITDIVIEDIKAKTRKGSKKWNISFSPLEVGKQYFESEIQKRELKLYKFQGFETKEHRDYRGFKKSSNKLEEKWGTHCVDSHCLSEMFFGNLEPVKKMYVLNFIRFNRRELHQGYHNGIRKLYGSTRSMGINRGTLVNHPKYGLSYVGGTSKSFISLHNVETGKRLSQSVKKSNLIILTKQSWRISNSSPT

SEQ ID NO: 1029 - protein, 360 aa, Synechococcus sp.
MRIPVLDPDGKPLMPTTPQRARRWVESGKAVGQWSKLGVWYVQLVAEPSGREAQGIAVGVDPGKLYSGVGVQSAQATLLKGHLVLPFKRVKERMEFRAMMRRGRRGRRINRKVAFDQRAHRQSRFSNRKSRKVPPSIRANRQLELRVLRELFKLFPISSIVYEYVKASGNKGFSPVMVGQRWMLEQLAVFGVPVVTRYGWETANMRRHLCLEKSRNKAEQSPDSHAVDGVALAATQFTAYRKVHRIDADGGDWFGSVVVTDSEFCIIRRPLVSRRQLHLAVPAKGGNRRKYGGTTTRHGVRKGDFVKAFKKGEVFYGWVGGDTKSHVSLSNKDWKRIGYFSPKKIQPLHRSTGLLAAKAA

SEQ ID NO: 1030 - protein, 361 aa, unidentified
  REGION 1..361: note = Cyanobacteria bacterium sp.
MRVPVISSDDQPLMPTKPSRARGWVREGKAKGFFKDLSQYCVQLLEEPTGTDTQSIAVGVDPGKKYSGLGVQSANYTLWKGHLILPFETVKKRMEQPRMMRRGRRGRRINRKLPYKQRAHRQKRFNHRRGHKLPASIRANRQLEYRVVKELTKVYPICAIYYEYVEAKGDKAFTPVMVGEKFMLQWLEKLAPTHTKLGWETASLRRDLKLEKSRNQGESTPASHAVDGIALASHSFRGMEKINGKNYRGQVWQGEVNLTESPFTVLRRPPVSRRQLHLMVEPLGGVRRKYGGTVTRHGCCKGDYVQASRKDQAFFGWVSGDTKSQVSVSNANWKRLGQFSTNKIRLLKHSTNLVTTAKAVI

SEQ ID NO: 1031 - protein, 377 aa, Synechococcus sp.; identical to SEQ ID NO: 625

SEQ ID NO: 1032 - protein, 365 aa, Planktothrix sp.; identical to SEQ ID NO: 650

SEQ ID NO: 1033 - protein, 344 aa, unidentified; identical to SEQ ID NO: 427
  REGION 1..344: note = Oscillatoriales cyanobacterium

SEQ ID NO: 1034 - protein, 367 aa, unidentified
  REGION 1..367: note = Cyanobacteria bacterium sp.
MQRVPVISHDGIPLMPTKPSRARRWLKEGRAKIYSNDLNVFAIQLINEPSGYETQDVVIGIDPGKLFSGVGVQSYKTTLLKLHLILPFPSVTKKMTARRILRRGRRGRRINRKLPYDQRCHRAKRFDNRIQKKLPPSIRANRKLELRVVKEVCRLFPISNIIYEYIKARGGKGFSPAMVGQKVMLKWLEKIAPTATQLGWQTSNLRQWLKLPKDKANKSKAVEETHSNDGVALAASHFIKWKEWQILNTRGGRWKGAVVVTSAPFKVIAKPNIYRRQLHFENPDSHKPNRHQYRKRKGGTITPFGFRAGDFVQAEKAGQIYRGWIGGYTQTDKSKNVSIYDTNWKRIGQFSPNKVKLLKRSCKLCVV

SEQ ID NO: 1035 - protein, 364 aa, unidentified
  REGION 1..364: note = Oscillatoriales cyanobacterium
MRIPVVDQDNKPLMPTTAARARKWIESGKAVKHWSDTGQFYVQLTVEPSGYTTQNIVIGIDPGKKFSGIGVQSAKFTLYTAHLILPFQTVRERMDTRRLMRRSRRGRRINRKVEFSKRTHRQKRFNNRRQGKLAPSIRANRQLELRIVSELFKIYPVAEIRYEYVKADVDLTSGRKKAKSGKGFSPVMVGQKWMLSQLEKFAPVVRIEGYQTASTRKYLGLTKNKADKSKPEFNTHAVDGVAIAATAFVEYRQYHTAKIDGANWFGAVVITTAQFRVIRRPPFSRRQLHLMLPAKGGVRRKYGGSTTRHRFRKGDLVKSPKGVGYVSGDTERQVSVSDANWKRLGQIASSKVQLIRRSNGLIVT

SEQ ID NO: 1036 - protein, 360 aa, unidentified
  REGION 1..360: note = Ga0315279_10000180
LNNLNNLTCIPVVSASGQPLMPCRPSKARKLLGKDWAEKHWNKLGQFYLQLKFQPKSELNVNQQVCLAVDPGSRWDGITILTKKQVLTCGMLVLPSRIVKKLEQRRQMRRARRYRKTPRRAERFNNRHRPEGRIAPSQKAKVDFRIRIVDEQCRLYPITKFAVEDVQFDHYRKRWGKYFSTVEIGKTRFYEHLQKLGPLTFYRGVDTYGLRLLLRLPKTSRKSTLHWTAHASDAIAIGYAQTGCADLSPPEFWIWKRFEYAKRQLHRLEPSKGGVRRRYGGSWSIPPFKKGDVTQWHNKLARVGGHLNEHGISLHSFNLKNKRLTQTANPNTCTRLFNQSILNQMKHPSIPPPHKWRGSP

SEQ ID NO: 1037 - protein, 396 aa, Coleofasciculus sp.; identical to SEQ ID NO: 461

SEQ ID NO: 1038 - protein, 361 aa, unidentified
  REGION 1..361: note = Ga0315273_10129206
MKVPVVDSNQVPLMPTTKHRAMRMVAKREATPFWKNGVWCIRLNKESSARHYQDIAVGIDPGSKREGFTVKSEAGTILNIQADAVTHVSDRVTMRREMRRGRRHRNTPCRKNRGNRSRGGLPPSTRARWQFKINMVKQLQELIPITDIVVEDIAAKSWKNARKWNSMFSPLEVGKEWAYDEFRGLGRLYVKKGWETAEIRNSLGLRKNKNKMAETWDAHCVDSWCLAYSVIGGEPAPDDLQILRIRPIQLHRRQLHRFQPAKGGVRKPYGGTRSLGFKRGSLVKHPKYGLTYVGGAMGDRISLHDVATGKRLCQNAKPADLRCLAHNSWQIRLLPVQEHSIYKKGHTLLPALKDGVSEREN

SEQ ID NO: 1039 - protein, 371 aa, Dolichospermum sp.; identical to SEQ ID NO: 156

SEQ ID NO: 1040 - protein, 415 aa, unidentified
  REGION 1..415: note = Ga0315285_10084064
MRTQTRPSEKAATCGGLRRTSGRLPNPDRFGRTTKCHAGKPAKPAVHGRREILPSVIAGAGVIPQTRVPVVDKAGKPLMPCLAVRARKLLDTGKAVGAWNKLGIFYIRLKVSKEPKNQRLVVGIDPGSKFEGYSVVGTKDTVLNIMSEAPDWVKKAVETRRNMRRARRFRNTRRRECRFDNRLAGTRRLPPSTKSRWDAKLRIVTKLAQIMPLTGAVVEDVKAVTKKGQRRWNVNFSPIEAGKEYLYNGLRGLGLELRLKQGMETKEARDALGLKKIKSKSRPVFSSHCVDSWILAASMSGAKMPTTKNLYYLTPLRLHRRQLHMFEPAKGGLRKRYGGTMSIGIKRGTLVVHLKHGLCYVGGNMDERLSLHSVSTGKRLCQNAKVSDLKTLTRIANNSQFLPALKCGVSLGGFL

SEQ ID NO: 1041 - protein, 286 aa, Prochlorothrix sp.; identical to SEQ ID NO: 391

SEQ ID NO: 1042 - protein, 344 aa, unidentified; identical to SEQ ID NO: 667
  REGION 1..344: note = Oscillatoriales cyanobacterium

SEQ ID NO: 1043 - protein, 388 aa, Symploca sp.
MLRVPVVSKSGKPLMPTKASRARRWLREGKARIFHNDLNIFAVQLLTETGVETQPISVGVDPGKMYSGVGVQSAKVTLWMAHLFLPFKTITERMEQRRIMRRARRGRRINRQIPYSQRCHRQKRFSNRHQGKLPPSIRANKQLELRVVKELMQIYPISTIHYELVMADVDKTSGRKGAKSGVGFSPVMVGQKQMLQWLSKLANVFTHKGWQKDCNGTSQLRKWLGLEKDKKNKASQTPATHAVDGVTLAAFEFIQWKEWHTSKSKHGAWVGDVCITPASFAVIRRPPVSRRQLHLCLPAKGGNRRKYGGTVTRHGFRKGDLVVAEKAGKTYTGWVSGDTKTQVSVSDGNWKRLGQFSAKKVQLLQRRVGLIVTPVAGLSNLTPLRGQI

SEQ ID NO: 1044 - protein, 344 aa, unidentified; identical to SEQ ID NO: 427
  REGION 1..344: note = Oscillatoriales cyanobacterium

SEQ ID NO: 1045 - protein, 382 aa, unidentified
  REGION 1..382: note = Ga0373625_0078553
MAARDGSLSLPCNVEGHETRTGEPVIGRIPVVSADGTPLMPCRAAKARKLLERGLAEKHWNKLGQFYLQLKFQPKSELNVNQQVCLAVDPGSKWDGIAIISRKGVLTCGMLVLPSKVAEKLTQRRQMRRARRYRKTPRRAKRFDNRYQRDGWIAPSQKAKVDFRTKIVDELCCLYPVSQFAVEDVRFNHYKKRWGKHFSTVEIGKAEFYKHLRTLGELTLYMGTETAELRERFDLPKNPVKKELAWTTHAVDAIAISCAEIGCAHPHPPEFWVWKRLEYARRQLHRLEPDKGGFRRRYGGSWSTPPFRKGDVVLWHGRLARVGGFMDGYGISLHSFGLKNKRFTQDANPNECTRLFNQHVFSRREQPQFLPPINGVGFLGGS

SEQ ID NO: 1046 - protein, 365 aa, Aphanothece sp.; identical to SEQ ID NO: 460

SEQ ID NO: 1047 - protein, 367 aa, Coleofasciculus sp.
MQRVPVISPDGRPLMPTKPSKARRWLKEGKAKIHPNDLNVFAIQLINEPSGYETQDVVIGIDPGKLFSGVGVQSSKATLLKLHLILPFPNVSKKMTARQILRRARRGRRINRKLPYSQRCHRAKRFDNRVAKKLPPSIKTNRQLELRVVKEIIQLFPISNVVYEYIKARGDKGFSPAMVGQRVMLEWLNQIAPTSTQFGWQTSNLRQWLKLPKDKSDKSQAVEETHSNDGVALAASHFTKWKEWLSCNTRGGNWEGEVYVTSAPFKVIAKPNIYRRQLHFENPDSHKPNPNQYRKRKGGTITPYGFRSGDFVQAEKAGQAYRGWIGGYTETAKSKNVSIYDVNWKRIGQFSPNKVKLLKRSCKLCVA

SEQ ID NO: 1048 - protein, 344 aa, Hydrococcus sp.; identical to SEQ ID NO: 817

SEQ ID NO: 1049 - protein, 357 aa, Mastigocoleus sp.; identical to SEQ ID NO: 892

SEQ ID NO: 1050 - protein, 365 aa, Microcystis sp.
MARVPVISKDGKPLMPTKPSRARRWIREGKAIGKFNDLDIFYVQLTDEPSDNKTQPIAIGIDPGKLFSGIGVQSSLFTLWKAHLELPFKRVRERMDNRRLMRRGRRKRRINRQLSFNLRAHRQKRFSNRRTGKLAPSIRANRQLELRVVSELTKIYPITDIYFEYIKADIDLTSSRKGAKSGKGFSPVMVGQKWAIEQLSQFATVHTRFGWQTSNLRKHLRLEKSKNKAEQSPESHANDGIALACFQFLDYWPFHNSNGHGYDWKGSVKVTNAPFAVIKRPPISRRQLHLMVFSKGGKRRKYGGSTTRHGFRKGDLVSSPKGIGYVSGDTEKQLSVSDTNGQRLGQIAVSKIQLIRRSNGLIVSR

SEQ ID NO: 1051 - protein, 336 aa, unidentified
  REGION 1..336: note = Ga0373630_0000139
MPCTPAKARILIKQGKAKPRWIKLGIFYIQLTFNPKNPATQPIAVGVDPGSKFEGTSVVGTKDTVLNIMSETVDWVKGELEQRRRMRRTRRYRKTRSRKCRGDNRHSEGRVPPSTRARWDAKLRIISQLQRILPISTAVVEDVKAETRKNHRRWNASFSPLEQGKRYFYSELRKSFQLITKEGWETEQLRKNYGLEKVGDKSRPVFESHCVDAWALATSQTGAEHPTTRALYYLVQLRWHRRQLHRLEPDKGGMRRRYGGTVSLGLKRGTLVKHVKYGLCYIGGNLRDRFSLHSLKTGGRITQNAERGDLKILTRITFRTQFLPALKDGVSLGDFR

SEQ ID NO: 1052 - protein, 343 aa, unidentified; identical to SEQ ID NO: 530
  REGION 1..343: note = Sponge metagenome

SEQ ID NO: 1053 - protein, 316 aa, Microcoleus sp.
MQYVPVVDSSQRPLMPTTPMRAQRWIESGKATPFFRKGIFCIRLNVEPSNRLMQPVAVGIDPGSKREGYTVKSKAHTYLNQQFHAVDWVKDAEEASTNARRARRNRKTPYRKNRQNRKRGGIPPSTKARWQFKVRVVKVLASIFPVSHIGIEDIKATTKKGCKAWNTSFSPLEVGKQWCNWELEKIAPVTKFDGWENTYQTRQALGLKKSKKKLSNSFDAHCVDSWVLAYLLVGGDSGPDNTAVMECQPLRIHRRQLHVFNPGKNGYRRPYGGSMSQGLKRGGIVKHPKYGKCCLEVVKTFKSLASACTVLIQANA

SEQ ID NO: 1054 - protein, 343 aa, Thermincola sp.; identical to SEQ ID NO: 345

SEQ ID NO: 1055 - protein, 622 aa, unidentified
  REGION 1..622: note = Ga0315284_10013693
VVKIIARDSERNLKDLVRDGGGRLKTTEPVARSRVRDTEGASLALSPSIGQSRREQLPELPAKVAQRAAPVMVPVLSVDGKPLMPCHPARARELVKKKGAKERWYQGIYAIQLIHKNEGVLQNLVCGIDSGFYREAFTVQSYSHTYLNVLSDAVGWVSTRVENRRNSRKSRRGRNLPCRKSRSNRMNKKAWIAPSTKSRWDIKLRIINFLRKLYPITTYVIEDIKAKNKKNCRRWNRIFSPIQTGKNWFYSRVEKVGALVLKVGYETYARRNLLGYKKLKDKFSESFYSHNVDSWVLSSFVTGKKELDMNSVFRMVPLKFHRRSLHSLSPAKGGYRKKFGGTVSLGFKRGSVIKHRELGCAYIGGTSDGRVTVHNVVTGNILTSRAFPADCRFMYYNNWRTAFIDEHGSFVGKRHRNVFLSVEYCTPEITEKKRQTNLKRYGVEKYTNREQAKKTSLERYGVEYTCAAPEVIEKRVATLMERYGRVFNVDEPHNKFHLEDKEKFIQDYESGLILGDLAIRYKISEPTLNHVIKDLGLSRAVVKAKSYVIDTPAEAASDYLTACLENNKVLSFYEYGKIKGQQYCTKMKRNFNTGRPYNHLLEELKSIALCADKHEAFLHRVK

SEQ ID NO: 1056 - protein, 356 aa, Chlorogloeopsis sp.; identical to SEQ ID NO: 256

SEQ ID NO: 1057 - protein, 366 aa, Nostoc sp.; identical to SEQ ID NO: 330

SEQ ID NO: 1058 - protein, 358 aa, unidentified
  REGION 1..358: note = Cyanobacteria bacterium sp.
VERFGVYYVQLLEEPSDTETQPISLGCDPGKSYSGFGIVSSKETLFRGHVVLPFQRVKERLGSAVIKNGKVIKNVRGRALQRRLRRSRRINRNLPFQLRNHRQCRLNNRIKSKLPPSILASRLMEIRIVKELCAIFPITDIVFEVVKADVDLTSGRKSAKSGKGFSPVMTAQYWCIRQLSKFAPVTKMYGWQKDGNGTSQIRKYLGLYKDKQNKKNPAPETHAVDGVALAASKFIRFAPFTKKNSHGHQWQGEVTITDSVFRVITRPSYFRRALHFDNPSKGGVRKRKGGTVTPFGFRCGDYVEAEKAGVIYRGWIGGYTNTDKTKNLSVYDLNWKRIGQFSLSKVKLLRRSNKLCIA

SEQ ID NO: 1059 - protein, 392 aa, Acaryochloris sp.; identical to SEQ ID NO: 638

SEQ ID NO: 1060 - protein, 348 aa, Brasilonema sp.; identical to SEQ ID NO: 278

SEQ ID NO: 1061 - protein, 365 aa, Microcystis sp.; identical to SEQ ID NO: 511

SEQ ID NO: 1062 - protein, 366 aa, Moorea sp.; identical to SEQ ID NO: 52

SEQ ID NO: 1063 - protein, 352 aa, unidentified
  REGION 1..352: note = Candidatus Poribacteria bacterium
MFVPVVDKNQNTLMPTKPSRARKWIKSGKATPFWKNGIFCVRLNVDASDTELQDIAVGVDPGSKKEGFTVKSKAHTYLNVQTDAHKDIGKKVEKRRELRRSRRSRKCPNRKNKTNRLANKERIPAGTRARWDWKLRILEWLSKLYPVSKVIVEDIKARTKPDKDRWNQSFSPLEVGKKWFVRELINRFGVGNVLKYEGTWTYARRNALGLEKLKDKLSDSFYAHCVDSWVMAHSVVNGDSKKAMSMKPDNTEVFCISPIPIARRNLHREQPKKGGIRSRYGGTILKDGLVKNTLVKHVKYGLTRLAGINAKGLFSIYSLDGKRLTTGAKQSDFKVLTKLNFQYSRSGHSSQA

SEQ ID NO: 1064 - protein, 371 aa, Dolichospermum sp.; identical to SEQ ID NO: 1027

SEQ ID NO: 1065 - protein, 401 aa, Arthrospira sp.; identical to SEQ ID NO: 218

SEQ ID NO: 1066 - protein, 335 aa, unidentified
  REGION 1..335: note = Candidatus Poribacteria bacterium
MFVPVKTKDGEQLMPMHAARARKLVKRGEATPYWHNGIYCIRLNKEPSDRKTQAIAVGVDPGSKKEGFTVKSEAHTYLNVQADAHKDVGKKIEKRRELRRGRRSRKCPNRKNRTNRLAHKERIPAGTRARWEWKLRILDWLSKLYPITHVCVEDIKARTIERAKKWNQSFSPLEVGKQWFYTEVKKRWSLLTLQGWETKEIRDSLGLKKSKQKLSATFEAHCVDSWCLAYHIVGGDSIPDNRDIFCISPIPIRRRELHRQNPQRGGKRPRYGGTMCLGIVKNTLVKHVKHGLLRVTGFDTRGGINLSEISSCKRVVRGAKSDSFRVLTKLNFQYR

SEQ ID NO: 1067 - protein, 371 aa, Dolichospermum sp.; identical to SEQ ID NO: 712

SEQ ID NO: 1068 - protein, 371 aa, Dolichospermum sp.; identical to SEQ ID NO: 156

SEQ ID NO: 1069 - protein, 372 aa, Calothrix sp.
MRVPVISKDNLPLMPTKPSRARRWIKQSKAIGKFDKLGIYYIQLLVEPSDTKTQEVVIGLDPGKMFSGVAVQTKKYTLQMLHLVLPFKTVKDRMQQRAMMRRSRRDRRINRKVAFNKRSHRQKRFNNRHNSKLVPSIRANKNLEYRVMELLFKTYPVSKIVIEEVEARGNVSFSPVIVGQRYQINRLSELAKVTLRKGWETSNLRKQLNLRKEKDDKSLQIPETHAVDAVTLASSEFVKYKEWDDANSHGHSWVGKVSITSSRFVIIRRPPISKKQLHLMTFSKGGNRRKYGGTVTRHGFRKGDYVKASQGKKSFYGWVSGDTEKQISVSDSDRKRLGQCSINKIKLIKRSTGLIIKAVKTACVDSLSVLKN

SEQ ID NO: 1070 - protein, 348 aa, unidentified; identical to SEQ ID NO: 190
  REGION 1..348: note = fermentation metagenome

SEQ ID NO: 1071 - protein, 366 aa, Moorea sp.
MLRVPVISPDGRPLMPTKASRARRWLNQGLAVIYQNDLNVFAVQLVNQPSEEQTQDIAIGIDPGKMFSGIAVQSNKATLWTGHLVLPYKKVRERMDTRRMMRSRSVGFAEKTRRSRRIDRRVPYSQRSHRQKRFSNRVNKKVPPSIRANRKLEQRVAKELSLLYPVKAIVYEVVKARGDKGFSPVMVGQYWSISQLEKIAPVTQKQGWETALKREALGLVKDKTDKSRQTVNTHAIDGIALAATHFLRRKNYYHSKGKLSIPENCNITNALFSVIRRAPIIRRQLHLLNFRACGKRRKYGGTTTSHGFRKGDYVEAVKAGKITHGWVSGETAKQVSVSDINWKRIGQFTARKVRLLKRSTGLLVNN

SEQ ID NO: 1072 - protein, 332 aa, unidentified
  REGION 1..332: note = Ga0315284_10116105
VKYVPVVSKTGKPLMPCSNYRANELIRKGKALRRFKSGLFYIKLTEREDGEVQPIAVGIDPGSKREAFTAKSESHTYLNILADAVTWVKEVVERKRNARRVRRQRKTPCRKNKMNRSKGGIPPSTKARWQLKLRIVNILRKLLPITDYVVEDISAETKKGCKKWNASFSPLEVGKKWFYKELKKLGNVELKEGWWTFAERNTYGLKKTKSKMSESFDAHNVDSWVLTNWKVGGHTKPDNTEITRMIPLQFHRRQLHRFESSAGGERKRYGGTMSLGFKKGSIVKHEKYGVCYTGGNQKGRLVLHSLKDGKRLCQNAKTEDTKFLTYNSFRRG

SEQ ID NO: 1073 - protein, 378 aa, unidentified
  REGION 1..378: note = Ga0373628_0002741
MATIGSLSLSYNVEGHKTPKGGRLSPTLKVPVVDIDGKPLMPTTPKRTRKLLKDGIAEKRWNKLGQFYLQMLRQVGTEKQPIHLAIDPGSKWDGVAVVSNRGVLTCGMLVLPSKVAEKLEQRRRMRRTRRYRNTPRRAKRFDNRRRSDGWIAPSQKAKVDFRIKIVDELCKLYPIKRFAVEDVRFNHYKKRWGKYFSTVEIGKAKFYSHLRGLGQLTLYRGVDTAEWRDQFGLPKNSQKNSLTWNSHAVDAIAIGCAELGCENPCPPEFWVWKRFEYAKRQLHRLEPDKDGVRRRYGGSWSLPPFKKGDVVQYQNRLARVGGFMDGLSLHGFGLRNKRFTQTAKPEDCNRLFNQQIFSKYENPQFLPPINGVGFLGGF

SEQ ID NO: 1074 - protein, 364 aa, Nostoc sp.; identical to SEQ ID NO: 245

SEQ ID NO: 1075 - protein, 358 aa, Mastigocoleus sp.; identical to SEQ ID NO: 426

SEQ ID NO: 1076 - protein, 364 aa, Prochlorothrix sp.; identical to SEQ ID NO: 486

SEQ ID NO: 1077 - protein, 387 aa, unidentified
  REGION 1..387: note = bioreactor sludge metagenome
MENQQVRVPVLAPDGQVLMPTKASRAKRWVKTGKAKEFFNDIGIYCVQLIAEPSGKETQPIVVGIDPGKHYSGIAVQSAKATLFMAHLLLPFDTVKEHKANQKLMRRGRRGRRINRKLPFNQRAHRQKRFSNRRQKGVPPSIKSNRQLEYRTVQELCRVFPISQIVFEYVKADVDLTSGRKAARSGKGFSAVMVGQKWMLEQLATLAPASTLYGWETASLRNHLNLEKQKTSKGDAKPETHAVDGIALACSQFVRYTSFHTANTRGHHWVGDVRVTTAPFVVIRRPPISRRQLHLMVPAKGGVRRKYGGTTTRHGFRKGDLVRAEMAGRVSVGWVSGDTERQVSVSDFNWKRIGQFTASKVQLLHRATGLLVTRPQYLSLNGASNPA

SEQ ID NO: 1078 - protein, 422 aa, unidentified
  REGION 1..422: note = Ga0315280_10003927
MQTLTRRLGSRSRVSGAEGYKNGRLRDLDLPSSLEPLNGTFTKSGELSLPCNVEGHETRTEEPVIGRIPVISANGTPLMPCRAAKARKLLERSLAEKHWNKLGQFYLQLKFQPKPELNVNQRLCLAVDPGSKWDGIAVVSTKNVLTCGMLVLPSKVAEKLTQRREMRRGRRYRKTPRRAIRFDNRRRRDEWIAPSQKAKVDFRTKIVDELCHIYPVSRFAVEDVRFNHYKKRWGKYFSTVEIGKAEFYRHLRTLGKLALYMGTETAELREKFNLPKNPVKKELTWTTHAVDAIAIGSAEIGCVNPYPPEFWVWKRFEYARRQLHRLEPDKGGVRRRYGGSWSTSPFRKGDVVQWHGRLARVGGFMDGCGISLHSFGLKNKRFTQTANPNECTRLFNQHIFSGQEQPQFLPRINSGVSLGDPL

SEQ ID NO: 1079 - protein, 340 aa, unidentified
  REGION 1..340: note = Microcoleaceae bacterium UBA10368
MQFVPVVDSNQRPLMPTTFARAEHWIKSGKATPFFRKGIFCVRLNVEPSNRHTQAVAVGIDPGSKREGYTVKSKAHTYLNQQFHAVDWVKDSEEASTNARRARRSRKTPYRPNRQNRKRGGIPPSTKARWQFKIRVVKVFATIFPISDIGIEDVKAITKKGGKRWNTSFSPLEVGKQWCYSELEKIAPVTKFDGYNDTYLTRQELGLKKSKAKLSNGFNAHCVDSWVMAYLMVGGDSGPENTAVRECKPIRIYRRQLHVFNPGKDGYRRPYGGSMSQGLKRGGIVKHPKYGKCYVGGEDVQKSRISLHSLDTGKRLCQNAKPADCKFLAYNSWRTVKPSF

SEQ ID NO: 1080 - protein, 361 aa, unidentified; identical to SEQ ID NO: 1008
  REGION 1..361: note = Cyanobacteria bacterium sp.

SEQ ID NO: 1081 - protein, 282 aa, Coleofasciculus sp.; identical to SEQ ID NO: 720

SEQ ID NO: 1082 - protein, 365 aa, Microcystis sp.; identical to SEQ ID NO: 869

SEQ ID NO: 1083 - protein, 400 aa, Calothrix sp.
MQRVPVISADNIPLMPTKASRARRWIKAGKAVGKFNKLGIFYVQLLVEPSDTQTQDIVIGLDPGKMFSGVAVQSQKNTLQMLHLVLPFKTVKDRMEQRAMMRRGRRGRRINRKLSFSKRSHRQARFDNRRNSKLPPSIRANKDLEYRTITLLCEIYPVKTIVIEEVEARGNKSFSPVMVGQRYQINRLSNLANVTLKKGWETSNLRKHLGLHKEKSDKSLQIPETHAVDAVTLACSEFVKYQTWEGVKTHGASWVGEVNITESQFTILRRPPISRRQLHLMVPSKGGNRREMRHRGESPWSLSRECAGTEDSVRQLRRKYGGTVTRHGFRKGDYVEATQGNKTYRGWVSGDTEKQVSVSDQNWKRLGQFSKNKVRLIRRSIGLIFTAVKTARVASLSALK

SEQ ID NO: 1084 - protein, 354 aa, Acidithiobacillus sp.; identical to SEQ ID NO: 228

SEQ ID NO: 1085 - protein, 390 aa, unidentified; identical to SEQ ID NO: 4
  REGION 1..390: note = Ga0315296_10000501

SEQ ID NO: 1086 - protein, 360 aa, Moorea sp.; identical to SEQ ID NO: 60

SEQ ID NO: 1087 - protein, 344 aa, unidentified; identical to SEQ ID NO: 427
  REGION 1..344: note = Oscillatoriales cyanobacterium

SEQ ID NO: 1088 - protein, 421 aa, unidentified
  REGION 1..421: note = Ga0315280_10070155
MQTLTRRLGSRSRVSGVDGYKNARVRDLALDNSLEPLNSAVTKNGSLSLPCNVEGHSTQTGEPVIGRVPVVSADGTPLMPCKPSKARKLLELGLAEKHWNKLGQFYLQLKFQPKSDLNVNQQICLAVDPGSKWDGLTVVSKEVVVTSGMLALPSKVAEKLTQRREMRRARRYRKTPRRAKRFDNRRRRDGWIAPSQKAKVDFRTKIVDELCRLYPVNRFAVEDVRFNHYRKRWGKHFSTVEIGKAEFYKHLRMRGELTLYTGVETATLREKFRLQKNPVKRELTWTTHAVDAIAIGSAEVGCVNLYPPEFWVWKRFEYARRQLHRLEPDKGDVRRRYGGSWSIPPFKKGDVVLWRNRLARVGGFMDGHGISLHSFGLKNKRFTQDANPHECTKLFNQHIFGKQEQPQFLPPINGVGFLGGS

SEQ ID NO: 1089 - protein, 356 aa, unidentified
  REGION 1..356: note = Candidatus Poribacteria bacterium
MFVPVKSKEGDRLMPTTPARARKWIKSGKATPYWSNGIFCVRLNVVPSGKHKQDICVGVDPGSKKEGFTVKSESHTYLNIQADAHNKVGKKVAKRRELRRSRRSRKCPNREHRTNRLSNKERIPAGTRARWDWKLRILNWLFKLYPVTQVCVEDIKARTKQYQTKWNQSFSPLEVGKQWFYTEIEKRWQLSTLSGHETKDIRDRLGLKKSKDKTAETFDAHCVDSWCLAYHVLGGDPIVDNTDIFCISPIPIQRRNLHREVPKKGGIRSRYGGTRFLGTRKNMLVKHVKHGLSVICGHMGKYLCLQPVEGGKRITRSAKVTDCKILTRLNFRYKQIVSKQLKVDQGELALQLILDI

SEQ ID NO: 1090 - protein, 342 aa, unidentified
  REGION 1..342: note = Candidatus Poribacteria bacterium
MFVPVKTKDGQQLMPLHAARARKLVKRGEATPYFNNGIYCIRLNKEPSDRDTQEIAVGVDPGSKKEGFTVKSEAHTYLNVQADAHNQVGQKVAKRRELRRSRRSRKCPNRKQRTNRLANKVRIPAGTRARWDWKLRILDWFSKLFPLTHVCVEDIKARTLKHAKKWNTSFSPLEVGKQWFYSEIKKRWELLLLQGFETKEIRDKLGLKKSSKKLSEGFDAHCVDSWCLAHYTVGGDSSVDNKAVMCISPIPIARRNLHREQYKKGGIRSRYGGTVLCKGLVKNTLVKHIKYGLTRLAGINAKGLFSLYSLDGKRLTTSAKRMDFKVLRKLNFNYRSGHSSPS

SEQ ID NO: 1091 - protein, 335 aa, unidentified
  REGION 1..335: note = Candidatus Poribacteria bacterium
MYVPVKSKEDKQLMPTTPPVARHLIKSGKATPYWSNGIFCIRLNYETSEYTQEIAVGVDPGSKKEGFTVKSEAHTYLNVQADAHKDVGKKVEKRRDLRRGRRSRKCPNRKNRTNRLAQKKRIPAGTRARWEWKLRILDCLSKLYPITHVCVEDIKARTIKGAKKWNQSFSPLEVGKQWFYTEVKKRWSLLTLQGWETKEIRDSLGLKKSKQKLSATFEAHCVDSWCLAYHIVGGDSLPDNRDIFCISPIPMRRRELHRQNPQRGGKRPRYGGTMCLGIVKNTLVKHAKHGFLRVTGFDTRGGLNLSEISSSKQVVRGAKPNTFRILKRLNFQYSI

SEQ ID NO: 1092 - protein, 352 aa, Scytonema sp.; identical to SEQ ID NO: 35

SEQ ID NO: 1093 - protein, 333 aa, Synechococcus sp.
MFVPVVDRNQQPLMPTTPARARRWIKAGKATPFWKKGVFCVRLNVEPSDRKVQPIAVGIDPGSKKEGWSVKSAAHTYLNIQADAVTWVREHVEQRRNMRRSRRYRKTPCRQPRSNRARGGLPPSTKARWQWKLRLARWLVRLFPVTTFVVEDIQAKTKGQRRWDTSFSPLEVGKRWFREQLSKLGQVLTCSGWETKQMRDALTLKKTSKKTAEVFETHCVDAWVLANSVTGGHKLPDNKRMLFLVPLRFHRRQLHRLQPDKKGRRTPYGGTLSLGCKRGSLVRHRRWGLAFVGGSSGNKLSLHRLEDGKRLTQNARKADVRHLSFCSWRFYGW

SEQ ID NO: 1094 - protein, 395 aa, Coleofasciculus sp.; identical to SEQ ID NO: 661

SEQ ID NO: 1095 - protein, 333 aa, unidentified; identical to SEQ ID NO: 731
  REGION 1..333: note = Ga0373630_0000877

SEQ ID NO: 1096 - protein, 361 aa, unidentified
  REGION 1..361: note = Cyanobacteria bacterium sp.
MRVPVISSDEQPLMPTKPSRARGWVREGKAKGFFKDLSQYCVQLLEEPTGTDTQSIAVGVDPGKKYSGLGVQSANYTLWKGHLILPFETVKKRMEQPRMMRRGRRGRRINRKLPYKQRAHRQKRFNHRRGHKLPASIRANRQLEYRVVKELTKVYPICAIYYEYVEAKGDKAFTPVMVGEKFMLQWLEKLAPTHTKLGWETASLRRDLKLEKSRNQGESTPASHAVDGIALASHSFRGMEKINGKNYRGQVWQGEVNLTESPFTVLRRPPVSHRQLHLMVEPLGGVRRKYGGTVTRHGFCKGDYVQASRKDQAFFGWVSGDTKSQVSVSNANWKRLGQFSTNKIRLLKHSTNLVTTAKAVI

SEQ ID NO: 1097 - protein, 378 aa, Syntrophomonas sp.
MPWLTKTSLSPADNAEATITSIRKKGVSFMSRKPEEQPRVSVMSVDGKPLMPTTPKKARMMMRDGLAIPRRNKLGLFYIQMVRSVGEKVQPMAMAIDPGAKYDGVAVSSHKQVEMKAMVFLPEGVPGKMDARRRLRRARRFRNTPRRPPRFNNRKKKKYWLSPTQRSKVECRLKVVRELCKIYPVQLIITEDIRFNHARSRDGKYFSTVEVGKTLTYQEYKRLANLKLVDVSSTDVWRMKFGIEKCTEKKWEQTPETHANDAVAMLMGVTECGEGAPPFYVWRRLQYVRRSLHRQNPQKGGVRHRFGGTANGVCLRKGDLVEAEKAGTVYLGWVCGLPTKATRIVGVAGADGKRVGQFNAKKVRLLARSTGFSWRKAI

SEQ ID NO: 1098 - protein, 365 aa, Microcystis sp.; identical to SEQ ID NO: 303

SEQ ID NO: 1099 - protein, 365 aa, Microcystis sp.; identical to SEQ ID NO: 274

SEQ ID NO: 1100 - protein, 331 aa, unidentified
  REGION 1..331: note = Ga0315295_10006545
MPCHPARARELLRKGRAIRGFDRGIFYIKMLDRDDGETQPVATGIDPGSKKEAITIKSGKHTFLNIQADAVTWVKDAEATSTMMRRHRRSRKTPYRECRSHRNAGKISLPPSTKARWQWKLRLCRWLARYYPISTFVVEDVKAKTHKGKSGHWNKNFSPIEVGKDWFYYQLGKIAPVTPVPGFETYTERNRLGLKKSSQKMSDKFEAHCVDSWTLANMEVGGHTKPDNTAMLFIVPLRFHRRQLHVLQPAKGGVRKSYGGTLSMGFKRGSWVEHPKYGLCYVGGTSEERISLHDMQTGNRLCHNAKPTDLKFLCTASWRIRKGEMAHSSPD

SEQ ID NO: 1101 - protein, 343 aa, unidentified
  REGION 1..343: note = metagenomes
MQTYVPVISSTGKPLMPTSNRKANRLIEKGRAIRRFDRGLFYLKLIDRGDGYTQPIVIGIDPGSKKEAFTAKAAAHTYLNVQADAVTWVSDAEETSTTMRRGRRGRKTPYRPMRTNRRQGQFKLPPSTRARWGWKLRLCGWLARYYPISLFVVEDIAAITKSGKRRWNASFSPLEVGKAWFYAKLGKLAAVETRQGYETKALRDQLGLKKSKQKLSDSFAAHCVDSWVLANASVGGHVQPDNSNVLYLVPLRFHRRQLHMLQPAKGGIRKPYGGTRSLGFKRGSWVKHPKHGVRYVGGTTAGSISLHRMQDGLRIAKVKPETVTFLCTASWRIKKGERHSAVA

SEQ ID NO: 1102 - protein, 351 aa, unidentified; identical to SEQ ID NO: 180
  REGION 1..351: note = Oscillatoriales cyanobacterium

SEQ ID NO: 1103 - protein, 358 aa, Moorea sp.; identical to SEQ ID NO: 394

SEQ ID NO: 1104 - protein, 344 aa, unidentified; identical to SEQ ID NO: 667
  REGION 1..344: note = Oscillatoriales cyanobacterium

SEQ ID NO: 1105 - protein, 371 aa, unidentified
  REGION 1..371: note = Ga0373625_0000114
MLFVPVIGSGGKPLMPCHPARARELVRSGRAVRRHDRGLFYIRLVDRADGATQPIAVGIDPGSKKEAFAVKSEAHTYLNIQANAVTWVSERMDVKRDMRHSRRGRNTPYRECRPNRGVKKGWLPPSTRARWGWKLRLCNWLSRYYPVAVFAVEDVKAKTRKGKRRWNRSFSPLEDGKAWFYGELEKFGRVKTYAGYETKALRDAFGLKKTRDKMSGRFEAHCVDSWVLANAEVGGHTSPDHIGIMYVVPLRFYRRQLHRLQPGKGGRRAPYGGTMSLGLKRGTWVRHPRHGVAYVGGFQNDRVSLHNLRDGRRLCKNAKPGDCVVLTRCSWRAYTEKKEGGRGVCSTGNFFASNGCKEFSSCPAQGRRCSR

SEQ ID NO: 1106 - protein, 365 aa, Microcystis sp.
MARVPVISKDGKPLMPTKPSRARRWIREGKAIGKFNDLGIFYVQLTTEPSNSKTQPIAIGIDPGKLFSGIGVQSSLFTLWKAHLELPFKRVRERMDNRRLMRKGRRGRRINRQLPFNLRAHRQKRFSNRRQGKLAPSIRANRQLELRVVSELTKIYPITDIYFEYIKADIALTSGRKGAKSGKGFSSVMVGQKWAIEQLSQLATVHTRFGWQTSNLRKHLGLEKSKNKAEQSPESHANDGIALACFQFLDYLQFHNYNGHGYDWKGSVKVTNAPFAVIKRPPISRRQLHLMVFSKGGKRRKYGGSTTGHGFRKGDLVSSPKGIGYISGDTEKQLSVSDANGQRLGQMAVSKIQLIRRSNGLIVSR

SEQ ID NO: 1107 - protein, 360 aa, Moorea sp.; identical to SEQ ID NO: 60

SEQ ID NO: 1108 - protein, 369 aa, Coleofasciculus sp.
MRVPVLSPEGQPLMPTKPSRARRWLKSRKAKVVHNDLGIFTIQLVSEPSDTKIQPISVGVDPGKKYTGMGVQSARDTLWMAHLQLPFDTVKGRMEQRRMMRRGRRGRRINRKAPYSQRAHRQARFDNRRFKKVPPSIRANRQLELRVIKELTKIYPLTTAVWEILVARGDKGFSPVMVGQYWAIDQLKKLLPVVTQEGWQTSNLRQLLGLEKQKTKKGDAIPATHAVDGVSLAKRQFVRYRQLKGKQGWWEGLVSITPAPFAVIRRPPISRRQLHLMVPSKGGIRRKYGGTTTRHGLRKGDYVKAEMAGRVVFGWVSGDTERQVSVSSADWKRLGQFSAKKVQLLQRSTGLVVVPITGLSNLPLLKGSV

SEQ ID NO: 1109 - protein, 359 aa, unidentified
  REGION 1..359: note = Ga0315279_10074524
VPTVSADGTPLMPCRPAKARKLLRNGRAVRKWSKLGVFYIQLRFNPKEPATQPLAVGVDPGSKFEAVSIVGTEDTVFNIMSEAVDWVKATLQRRREMRRARRYRKTRCRPCRINNRLRSQRRNLPPPSTKARWDAKLRIITQLRKIIPFSSTVVEDIKAETKPGQRKWNENFSPLETGKQYFYSQLRHMGLKVETKTGTETRDLRVKFNLKKISDKSRPVFESHCVDAWCLAASVTGAKHPTTRSLYYTVPLRWHRRQLHRLEPDREGIRRRYGGTVSLSLKKGTLVKHVKYGFCYVGGTLKDCVSLHDLKTGKRLTQNAKIQNLKTLTRIAFRTQFFPSADTETRNSSPCLKAGVSLR

SEQ ID NO: 1110 - protein, 366 aa, Richelia sp.; identical to SEQ ID NO: 985

SEQ ID NO: 1111 - protein, 309 aa, unidentified
  REGION 1..309: note = Ga0315294_10043458
MKVFVIDHEGSPCLPTKPRRARQLLDQGKARVKQVVPFVIQLTRKIDNPIGSFEMGVDDGSKHVGIAIKNTKTDEIVFRAQLDHRQDVSRKIEQKKNYRKARRFRLRCRKPRFDNRTAKDKLAPSIRQKKETVIRVIKDMRKRLNIVKITVEEIFFNHAKHNYGKFFSLVEIGKKYLRKQIESMGLVYEYTKGFITKESRIVLGLSKKHSNDACAILKSNKINCIEYFIKPRRTKIWELNPTKICMEKNGFRHYDLVKTIHITRGVVIGSVRSLKAKCLTVRTRFNDNFSVSYNKSSVLQRFCGLIYTY

SEQ ID NO: 1112 - protein, 370 aa, Pleurocapsa sp.
MQRVPVVDKNGSPLMPTKCSRARRMVRDGKAVGKWNKLGVHYIQLVKDPSGREMQSISVGLDPGKFYSGIGLVSSKFTLFTAHVFLPFETVKNRMEQRLMMRRSRRGRRINRKVEFSQRAHRQKRFSNRRQKGVAPSIKANRLLEISIISELSKLYPISSIVYEYVKAKTIKGCSFSPVQVGQKWAIEQLSKIAPVVTKFGWQTSNLRKHLGLPKQKLNKKEPIPATHAVDGLVLAVTQFIDYLPFENSGGRGHCWQGKITITDAPFLVIRRPPISRRQLHLMLPSKGGNRRKYGGTITRHQGIRKGDFVEGVKAGITSQGWCSGDTARQISISNAAWKRIGQFTASKVRLLQRSTKLICTQGKNFTVAV

SEQ ID NO: 1113 - protein, 338 aa, unidentified; identical to SEQ ID NO: 416
  REGION 1..338: note = Oscillatoriales cyanobacterium

SEQ ID NO: 1114 - protein, 373 aa, Nostoc sp.; identical to SEQ ID NO: 760

SEQ ID NO: 1115 - protein, 361 aa, unidentified
  REGION 1..361: note = Cyanobacteria bacterium sp.
MRVPVISSDEQPLMPTKPSRARGWVREGKAKGFFKDLSQYCVQLLEEPTGTDTQSIAVGVDPGKKYSGIGVQSANYTLWKGHLILPFETVKKRMEQPRMMRRGRRGRRINRKLPYKQRAHRQKRFNHRRGHKLPASIRANRQLEYRVVKELTKVYPICAIYYEYVEAKGDKAFTPVMVGEKFMLQWLEKLAPTHTKLGWETASLRRDLKLEKSRNQGESTPASHAVDGIALASHSFRGMEKINGKNYRGQVWQGEVNLTESPFTVLRRPPVSRRQLHLMVEPLGGVRRKYGGTVTRHGCCKGDYVQASRKDQAFFGWVSGDTKSQVSVSDANWKRLGQFSTNKIRLLKHSTNLVTTAKAVI

SEQ ID NO: 1116 - protein, 358 aa, Moorea sp.; identical to SEQ ID NO: 495

SEQ ID NO: 1117 - protein, 365 aa, Microcystis sp.; identical to SEQ ID NO: 852

SEQ ID NO: 1118 - protein, 390 aa, Oscillatoria sp.
MLDSVFEKTITPIGGLSQTMLRVPVLSPDGKPLMPTKPSRARRWMRGGLAMGKWSDLGVFYVQLTEQPSGKETQLIAVGVDPGKLYSGIGVQSAKATLFMADLIRPFQTVKERMEQRRMMRRNRRGHRINRQVQYSKLAHRQKRFDNRRGNQLPPSIRANRQIELRVVTELCRLFPVSKIVYEYVKARGSKSFSPVMVGQKVMLTWLAKLAPVETRFGYKTASLRAQLGLVKSQDKSSQNPESHAVDGVALACSEFIKYKPFYTATTHGHTWKGSVKMTLSAFVVIRRPPISRRQLHLMVPSKGGVRRKYGGTTTRHGVRKGDLVRASMAERVVMGWVSGDTARQVSVSNFDGKRLGQFSASKVQLIHRATGLLVSRPRYLSVNVEPSIA

SEQ ID NO: 1119 - protein, 349 aa, Scytonema sp.
MFVPVVDKNNRPLMPTTPSRAKRWIKSGKATPFFRKGVFCVRLNTEPSNRNYQPIAIGVDPGSKREGFTVKSKSHTYLNVQTHAVDWVKDHIETRRNMRRARRFRKTPCRQNRQNRLVNKERLAPSTKARWQWKLRICKWLESMFGVTTFVVEDIKAKTRKNGRKWNSMFSPLEVGKEWFYSELRQITNLEIRSGNETYEMRQELGLKKSKNKLSNKFESHCVDSWVLANWYVGGHLIPDNTKLIEVIPLEFHRRQLHRLQHQSGGTRPRYGGTISAGFKRGSIVKHSKHGVCYVGGWQESPTKKEPNRKTISLHSLTTGKRLTQNANPNDCKFKSYGSWRIVTADKSA

SEQ ID NO: 1120 - protein, 373 aa, unidentified
  REGION 1..373: note = Ga0373626_0013195
MPVSVEGLNTARLSQGPLATNLGNKGNRMIFSVPVVDQSGTPLMPTYLRRAEGWVRTRKATPFWSRGVWCVRLNVEPSAKHLDPVAVGVDPGSKREAFTIKSKARTHLNVLAHAVDWVKDAVEIRGNMRGGRRFRKAPCREPRFDNRKRKGMPPSTKARWQWKLRIAKWLTRMFPVSGFVVEDVRARTKGRRKWDVNFSPLEVGKSWFYGELKKLAPVITRQGWETKVLRDRLGLRKTHSKLAEKFSAHNVDSFALAWDMVGGDGKPDNESLLVLVPFRFHRRQLHAFQPSKNGVRRSYGGTRSLGFKRGSLIRHPKHGLCYVGGSSKGMLSLHSLTDGRRVCQNAKPGDVSFRGFGSFRFYGKTGAANSSAA

SEQ ID NO: 1121 - protein, 341 aa, Methanoculleus sp.
MRLPVFDTNRTPLMPTTPARARLLLKLGKARPYWNKLGIFCIILTYDVKPDNQPLVVGIDPGSSFEGWSVVGTNDTVLNGMSETPKHVKKAVELRRILRRARRHRKCWRRPARFNNRLQGRTFLPPSTFARWNARVRILEQLQKILPITAVVVEDVAAVTKKDSKRWNTNFSPLEVGKALFYQKIRELGCDLYLRAGYETKALRERFGLKKTGQKSKQTFASHAVDAWVMAADVSGAERPTEQGLYYWIPLRWHRRQLHMVQPAKGGIRKPYGGTMSMHFTRGALVRHVKHGLTYIGGTLKDRVSLHSTATGKRLTQNAKVSDLELLTTIRWRGQFLAQIK

SEQ ID NO: 1122 - protein, 365 aa, Gloeocapsa sp.; identical to SEQ ID NO: 710

SEQ ID NO: 1123 - protein, 367 aa, Lyngbya sp.; identical to SEQ ID NO: 676

SEQ ID NO: 1124 - protein, 390 aa, Chamaesiphon sp.; identical to SEQ ID NO: 954

SEQ ID NO: 1125 - protein, 344 aa, Hydrococcus sp.; identical to SEQ ID NO: 817

SEQ ID NO: 1126 - protein, 365 aa, Microcystis sp.
MARVPVISKDGKPLMPTKPSRARRWIKEGKAIGKFNDLDIFYVQLTDEPSDNKTQPIAIGIDPGKLFSGIGVQSSLFTLWKAHLELPFKRVKERMDNRRLMRRGRRGRRINRQLPFNLRAHRQKRFSNRRTGKLAPSIRANRQLELRVVSELTKIYPITDIYFEYIKADIDLTSSRKGAKSGKGFSPVMVGQKWAIEQLSQFATVHTRFGWQTSNLRKHLRLEKSKNKAEQSPESHANDGIALACFQFLNYLPFHTSNGHGYDWKGYVKVTNAPFAVIKRPPVSRRQLHLMVFSKGGKRRKYGGSTTRHGFRKGDLVSSPKGIGYVSGDTEKQLSVSDTSWKRLGQIAVSKIQLIRRSNGLIVSH

SEQ ID NO: 1127 - protein, 348 aa, unidentified; identical to SEQ ID NO: 190
  REGION 1..348: note = fermentation metagenome

SEQ ID NO: 1128 - protein, 338 aa, unidentified; identical to SEQ ID NO: 416
  REGION 1..338: note = Oscillatoriales cyanobacterium

SEQ ID NO: 1129 - protein, 305 aa, Richelia sp.; identical to SEQ ID NO: 542

SEQ ID NO: 1130 - protein, 366 aa, Moorea sp.; identical to SEQ ID NO: 799

SEQ ID NO: 1131 - protein, 344 aa, Scytonema sp.; identical to SEQ ID NO: 19

SEQ ID NO: 1132 - protein, 365 aa, Microcystis sp.; identical to SEQ ID NO: 336

SEQ ID NO: 1133 - protein, 332 aa, unidentified
  REGION 1..332: note = Ga0315273_10121282
MFVPVVNRKQEPLMPTTPSRARKWIKSRKATPFWKKGIFCVRLNIDPSNQEIQEIAVGIDPGSKKEGFTVKSLTHTYLNIQSDAVTWVKDAIEVRRNMRKGRRFRNTPCRANRMNRKRGGIPPSTKARWNWKLRICNQLKKLYPIEVFVVEDIKARTWKGGKKWNQSFSPLEVGKNWFYHELGKLGKVELKQGYETKELRDLLGLKKTGTKTAEVFEAHCVDSWVLASSWVGGKVPDNKELLLITPLRFHRRQLHKLQPEKGGIRKRYGSTRSLGFKRGSLVKHPKYGITYVGGNYKNRISLHSLETGIQLCFNAKLLDCTFLTYNMERWRY

SEQ ID NO: 1134 - protein, 358 aa, Moorea sp.
MLRVPVISPNGKPLMPTKASRARRWLKQGFAVVYPNDLNIFAIKLVNQPSGSQTQDIAVGVDPGKLFSGIAVQSQTTTLWTGHLVLPYKRVRDRIDTRRIMRRTRRSRRINRKVSYSKRAHRQKRFENRIAKKVPPSIRANRQLEFQVVSELFRLYPVKAIVYEVVKARGNKGFSPVMVGQHWAISQLQQMAPVTRKQGWETALKREGLGLTKDKTDKSRQTLETHGVDGIALAATHFFRRRNYYYRNGKVSFPENCTVTNALFAVVRRAPISRRQLHLLQFSKGGKRRKYGGTTTRHGFRKGDYVEAVKAGKTYRGWVSGETAKQVSVSNINWKRIGQFSARKVRLLKRATGLIVNY

SEQ ID NO: 1135 - protein, 355 aa, Desulfotomaculum sp.
VEKEVKKACALYFSDRIPVISRDSRPLMPCKPSKAKKLLNSGKAEPRWSKLGLFYIQLTIEITSEYNANQYFILTNDPGSRFDGFALACKYVQLRIMAIMPEYVHEKMKNRRELRRARRYRNTRRRPERPRSPGPDWIAPSQLAKVLFRLAIVRELCKLFPIKHFIVEDVKFDYYNKRWGKYFSMVEIGKGYYYRELRKLGTLVLVEGWQTKLWREEAGLKKTSRKDALTPESHVNDAVAMLLGLAGCEPDERAPFYILRRPEFARRSLHRQNFQKGGIRPRFGGTCSGGYFRKGDYVEAEKAGKIYRGWVCGLPTEKTPLVGVMDARRKRIGQFILSKVRLLRRSGNILWERII

SEQ ID NO: 1136 - protein, 410 aa, unidentified
  REGION 1..410: note = Ga0373630_0013875
MQTLTRPSLGNQTTCVELQERTDASLVRTASAEPLNAASCVGLSSAYIVEGKHDSGRGEAAIGRIPVISQDGTPLMPCTPAKARKLLESGKARKQWSKLGIFYIQLKFNPKSPTTQPLAIGIDPGSKFEAFSIVGTKSTVLNIMSEATDWVRRAVETRREMRRARRYRNTRRRPCRINNRPSHQNRLPPSTKARWDAKLRIVRQLKKIIPITTAVVEDIKARTKKGQRRWNSSFSPLEAGKQYFYTELRRVGLNVKTRQGSETQQLREAHGLKKLRNKSKPIFETHCVDSWTLAASATGAQQPTTRRLHYLVPLRWHRRQLHKLQPSTGAVRRREGGTISLGLKRGTLVKHIKYGFCYIGGNMKGRLSLHSLKTGRRITQRATRKDFKVLTRIAFRTQFLPPLKQVGFLE

SEQ ID NO: 1137 - protein, 357 aa, Mastigocoleus sp.; identical to SEQ ID NO: 892

SEQ ID NO: 1138 - protein, 421 aa, unidentified
  REGION 1..421: note = sediment metagenome
MTAYKSHTKPVRAGTGRLKTTEPTARGRAQYVANASQVCNRYVGQPRREKLPVNAERQRQSPGLKSPVWVPVTSSTGSPLMPCRPAYATALIRLGRAKRRWFKGIFAIQMLDRAEGSVQQVACGIDPGSKREAMTVQSKQHTYFNELSDAVTWVKDRVEVRRNMRRARRFRKTPCRTPRANRNINSKRLPPSTKSRWQAKLRIINFLRKLYPITDYVVEDIKAKTWKGSGKKWNKSFSPLEVGKAWFYDEVSKLGNLITKQGWETSERRNLLGFKKSSAKMAETFDTHNVDSWVLASFVTGKSVIDNKAIFRMIPLQLHRRQLHRFEPDKGGVRRPYGGTLSMGMKRGSVVNHTRLGRVYIGGTTREKVSLHDLITGERLTKCGSIKDCSFLHFNSWRTSWIQGFASSTGTRPVVSAHRTL

SEQ ID NO: 1139 - protein, 408 aa, unidentified
  REGION 1..408: note = Ga0315285_10058279
MPNRKRQIKQETRVDKVGGHKAHSRPKSTELTGRGSPKDDRNASLVSVRSVSQSRRDSTKKKAVRPISSGGRSNPVQYVPVISKTGKPLMPCCPARARELISKGNAVGKWKVGIFYIQLTQREDGVVQTIAVGIDPGSKREAFTVKSAKHTYLNVLADAVAWVKDAVETRRMMRKNRRFRKTPCRASRYNRTIGGLPPSTKARWQAKIRIVDILAKLYPITDYIVEDISATTKEGKRKWNASFSPLEIGKKWFYTELQKRGSLTTKQGYETKELQDTLGLKKTKSKMEEKFSAHNLDSWVLANSVVGGHAKPDNEAIWRLIPLRFHRRQLHYLQATKGKRLHYGSTMSLGIKRGSLAMHPKWGLCYLSGYMGDRVSLRCLADGVILCQNAKKEDLKILRFNSWRYKAA

SEQ ID NO: 1140 - protein, 365 aa, Aphanothece sp.; identical to SEQ ID NO: 460

SEQ ID NO: 1141 - protein, 344 aa, unidentified; identical to SEQ ID NO: 575
  REGION 1..344: note = Oscillatoriales cyanobacterium

SEQ ID NO: 1142 - protein, 341 aa, unidentified
  REGION 1..341: note = Archaeon sp.
MCERVPVLAPDGEPLMPTKPQRARRWLKGGKAEPVRTELCVFAVQLVEEPMGREKQEIAIGLDPGSKFSGVAVVSKEAILIGLNLELPQQVSERMDKRRERRRNRRYRKTRRREKRFDNRSGHWLAPSIKARKELEIRVVRELSKVFPISQIVVEDVSYNHYQHMEGSYFSQVEVGKNWLVSELKEIAPVRLFQGWQTSREREELGLEKTSDKAEKTPKSHAHDAIALCSLALENIELTDFSFNIVTRPKYSRRKLHLEQPSKGGVRRRYGGTTTQSKYRKGDYVEARQGDKTVRGWVSGYTKNRISVSDFDWNRLGQFVKSKTHLINRNTGLMVKSKEVN

SEQ ID NO: 1143 - protein, 382 aa, Geitlerinema sp.; identical to SEQ ID NO: 173

SEQ ID NO: 1144 - protein, 306 aa, unidentified
  REGION 1..306: note = Candidatus Poribacteria bacterium
VFCLRLNVDPSDRYFQEIVVGVDPGSKKEGFTVKSEAHTYFNVQADAHSKVSKKVEKRRELRRGRRSRKSPNRKHKQHNLSNRERVPAGTRARWDWKLRILQWLSKLYPVTHVCVEDIKARTIERAKKWNQSFSPLEVGKQWFYTEIRKCWKLLTLQGWQTKEIRDKLGLKKSSKKLAETFDAHCVDSWCLAYHTVGGDHSTPDNTDIFCISPIPIRRRELHRQNPQKGGKRPRYGGTVLTDGLIKNTLIKHVKHGLTRLAGINAQGLFSIYSLDGKRLTTGARRTDFQVLTRLNFNYKGGVSSPC

SEQ ID NO: 1145 - protein, 334 aa, unidentified; identical to SEQ ID NO: 766
  REGION 1..334: note = Candidatus Poribacteria bacterium

SEQ ID NO: 1146 - protein, 387 aa, Anabaena sp.
LGKAQDRVFRLLEGLSLMRVPVISANNIPLMPTKPSRARRWIKTGIAIGKFNKLGIFYVQLTCVPSDTQTQEIVIGLDPGKMFSGVAVQSQKYTLQMLHLVLPFKTIKDRMKQRSMMRRGRRGRRINRKLSFSKRSHRQARFDNRRSSKLPPSIRANKDLEYRTITLLCEIYPVKTIVIEEVEARGNKSFSPVMVGQRYQINRLSELTNVELKKGWEASNLRQYLGLHKEKSDKSLQIPETHAVDAVTLACSEFVKYQTWNDIKNHGASWVGNVTITNAQFTILRRPPISRRQLHLMVPSKGGNRRKYGGTTTRHGFRKGDFVEATQGKKTFFGWVSGDTEKQVSVSDCNWKRLGQCTAKKVRLIKRYTGLIVLSTRKMFNLTTSSH

SEQ ID NO: 1147 - protein, 365 aa, Microcystis sp.; identical to SEQ ID NO: 154

SEQ ID NO: 1148 - protein, 340 aa, unidentified
  REGION 1..340: note = Ardenticatenales bacterium
  VARIANT 340: note = Xaa can be any naturally occurring amino acid
MQYVPVVSSIGKPLMPCHAARARQLIRKGRAVGRFNKGIYYLQLLDRADGVIQPIAVGVDPGSKREGFTIKSETHTYLNVQAEAVDWVGKHVEIRKILRRGRRYRQTPYRQNRQNRARGGIPPSTKARWQLKLRVLKWLAALYPISIVVVEDIAAVTKAGKRRWNSSFSPLEVGKAWFYHEVEKMAELWTFKGYQTAAMRQVMGLKKSRQKLATTWDAHCVDSFVLATLVIGGHVEPDNKEMLILVPLQLHRRALHRANPQKGGVRPPYGGTKSLGFKRGSWVKHPTWGVCYVGGASKGRISLHSLATGCPLGEAAYPNRETRGVSIPVLCQLARLSCLX

SEQ ID NO: 1149 - protein, 394 aa, unidentified
  REGION 1..394: note = Ga0315294_10088530
MRIGLQERQDTPQVLTTSPESLNGMSLETLNNRDNSKSDFLVGCGYNTSNGGSLSAKHNVFVLGVDGKPLTPTTNAKARKLMKEKQATPIWNKFSKFGIRMVVETRKEVPKTILGQDWGTKFEGYSLISGNENILNVMLKLPDKKKLIKKLEERRRTRRARRWRNCGRREERFSNRSRQNFIAPSQLQIVNSRLKCMDEFFKCYPIQKVAIEDVCFNHRDKRWGKNFSTVEIGKQKIFKHIRDIVGVENLILFKGYDTQEYREKLNLTKANDKSSKNFHSHCVDSFVIANELSNATPNKNLIYVDDNYRFVRRKLHDTQYTKGNIRAKFSTGNFKGIRKGTMCKFGQIVGGTKNQAWYCDFDLQANGRKIYQKGKMLSKIGWLSHHYKSMEVMV

SEQ ID NO: 1150 - protein, 373 aa, Brasilonema sp.; identical to SEQ ID NO: 940

SEQ ID NO: 1151 - protein, 304 aa, Chloroflexi sp.
  VARIANT 304: note = Xaa can be any naturally occurring amino acid
VRVPVVDSRGVPLMPCTPAKARHLFKGGLARPKRNKLGLFYVQLCYQQQPDNQSLTVGIDPGSAFEGFSVVGTRDTVVNLMVEAPDHVKEAVEGRRTMRRTRRSRKWRRPKRFDNRLNRKKRIPPSTRSRWEAKARIVKQLCAILPINSAVVEDVQAVTRTGKHRKWNAAFSPVQVGKDHLYGLLCKMGLTLHLKEGWQTKALRETYGLKKTNRKSKQSFESHAVDAWVLAASHSGAKKPTCTRLWYIVPARLHRRQLHRLQASKGGIRKPYGGTRSLGLKRGTLVRHTKYGWCTVGGFDRKKX

SEQ ID NO: 1152 - protein, 360 aa, Synechococcus sp.; identical to SEQ ID NO: 1029

SEQ ID NO: 1153 - protein, 390 aa, Scytonema sp.; identical to SEQ ID NO: 159

SEQ ID NO: 1154 - protein, 344 aa, unidentified; identical to SEQ ID NO: 667
  REGION 1..344: note = Oscillatoriales cyanobacterium

SEQ ID NO: 1155 - protein, 365 aa, Microcystis sp.
MARVPVISKDGKPLMPTKSSRARRWIKEGKAIGKFNDLGIFYVQLTDEPSNNKTQPIAIGIDPGKLFSGIGVQSSLFTLWKAHLEFPFKRVRERLDNRCLMRRGRRGRRINRQLPFNLRAHRQKRFSNRKQGKLAPSIRANRQLELRVVSELTKIYPITDIYFEYIKADIDLTSGRKGAKSGKGFSSVMVGQKWAIEQLSQLATVQTRFGWQTSNLRKHLRLEKSKNKAEQSPESHANDGIALACFQFLDYLPFHTSNGHGYDWKGYVKVTNAPFAVIKRPPISRRQLHLMVFSKGGKRRKYGGSTTRHGFRKGDLVSSPKGIGYVSGDTEKQLSVSDTNWKRLGQIAVSKIQLIRRSNGLIVSR

SEQ ID NO: 1156 - protein, 409 aa, unidentified
  REGION 1..409: note = Ga0373626_0004519
MQILTTLSPKRLRNGNYKNDRMQLQVLSTLGEPINSISPEKENKLPSALGMETKLERGRNRYMIPIVSENGKQLMPCKPSKARKLLEKGLAEKKWNKLGMFYLQLKFNPKSKANKGQKLCLGLDVGSKYDGIAIVSKNKVQQTGMIELPKGIAKKIEQRRQMRRARRFRNCRRRKCRLGNRNKEGFIAPSQKAKVDFRIKIIEELMKIYPIKQFAVEDVKFNHYTKRWGKHFSTTEIGKTRLYEFLKSKGKLFLFSGVKTSELRDKFNLPKTSDKRERNPYSHSVDAMVLAGKVLRLKDYQIPSFYVWKRYQYCRRQLHKFQFEKSGIRKREGGTNSIYPFKKGDIVLYQNRLARIGGYMNNLLSLHTFNLDNKRFTQRAEPKDCSRLFNQRIKSQFIPPINGVGFLAT

SEQ ID NO: 1157 - protein, 379 aa, Crocosphaera sp.
MLRVPVLSPDGTPLMPTKASRVRRWISDGKAVGKFNDLGQFYVQLLVKSSDTKTQSVSVGIDPGKHFSGIGVQSSKYTLFTAHLELPFKKVRERMNNRRMMRRGRRGRRINRKLPFHLRAHRQKRFSNRKQSKLPPSIKANRQLELRVIQQLCKVFPITDIYFEYVKADVDLTSGRKGAKSGKGFSAVMVGQKWMLKQLEKLGNVHTIYGWQTSNLRKHLRLDKSKNKSKQTASSHAVDGVTLACYQFLEYKAHCSGNNHGHIWQGNVTITACQFMVIKRPPISRRQLHLMLPIKGGKRRKYGGTVTRHNIRKGDFVKAIKAGKVFYGWCSGDTAKQVSVSNFDWKRLGQFTASKVVLLQRSTGLICKQEADFVGATVC

SEQ ID NO: 1158 - protein, 344 aa, unidentified; identical to SEQ ID NO: 777
  REGION 1..344: note = Oscillatoriales cyanobacterium

SEQ ID NO: 1159 - protein, 409 aa, unidentified; identical to SEQ ID NO: 1156
  REGION 1..409: note = Ga0373629_0013319

SEQ ID NO: 1160 - protein, 334 aa, unidentified
  REGION 1..334: note = fermentation metagenome
MIRVLDENKNPLMPCSEKRARKLLERKEAKPYWYKGVFCIVLQRPPKTTFKQEVVVGIDPGSKFEGLTVKSEAHTLLNIQTEAKVDVKKKMETRTALRRSRRSRKLRYRPNRSNRGVGKRLPPSTKSRWQYKLSLLNWLRRMYPVTHVVVEDISATTKEGKRRWNKAFSPLQVGKNYFRDEVEKMGVEYSEYAGYETYGFRNSHGLKKNSNKSKKDFYTHCVDSWVLANEVVGGHTKVDNERVLFLSPLKRYRRQLHRQNPQKGGTRPPYGGTRSLGLERGTLVKHPKYGLSLVGGTSKGRVSLNSLQTNKRLTQLVKTEDLTILTNQKWNIQT

SEQ ID NO: 1161 - protein, 356 aa, unidentified
  REGION 1..356: note = Candidatus Poribacteria bacterium
MGQYKLFGGLLTMLVPVVAKNQNPLMPTKPSRARKWIRDKKATPFWKNGIFCVRLNIEPSDRYFQEIAVGVDPGSKKEDFTVKSKAHTYLNVQADAHKVVGKKIAKRRELRRSRRSRKCPNRKNRTNRLANKARVPAGTRVRWDWKLRIVDWLSKLYPVTKICVEDIKARTKPDKDRWNRSFSPLEVGKRWFVSELITRFGVGNVFMYKGLWTSARRQALGLEKLSDKLSDDFSAHCVDSWVMAHSVVNGDSKKAMSMKPDNTQVFCIAPIPIRRRELHRQNPQRGGKRPRYGGTMCLGIVKNTLVKHVKHGLLRVTGYDTRGGLNLSEITSSKRIGRGAKPQSFRILTKLNFQYK

SEQ ID NO: 1162 - protein, 350 aa, unidentified
  REGION 1..350: note = Candidatus Poribacteria bacterium
MFVPVTYESKPQMPTKPSRARRWIRDKKATPYWSNGVFCVRLNVPPSDACFQDIAVGVDPGSKKEGFTVKSEAHTYLNVQAAAKIDVKTKIEKRRNLRRGRRYRKRPYRKNRTNRLANKQRIPPSTRARWDWKLRILDWLSKRFPVTHICVEDIKAGSRQGQRRWNASFNPLQVGKQWFYEQVASRWALLTLQGHDTARIRESLGLKKTSQKTAETFDTHCVDSWCLAFHTVGGAIDVDNTSVFCIYPIHHKRRCLHRELPKKGGIRSRYGGTMSMGWKKQTLVKHPKHGLCLVGGYQKGRLALHDVETGKRISLSAKPEECKRLKRVQFRFKQIESVLIKQDRVQLTRF

SEQ ID NO: 1163 - protein, 413 aa, unidentified
  REGION 1..413: note = Ga0373625_0098307
MSPKKTHTKPTRAGIGRLKTTEPTVRGRTTDIRDASQVPLPSVGQSRREKLLAEPLRARQSPRPYPVWVPVISSTGSLLMPCRQAYARALIRDGRAQKRWFRGIFSIKLLNRAEGKVQQVVVGVDPGSKREAMTIQSKQHTYLNVLSDAVTYVKDRVEVRRNMRRSRRFRKTPCRKNRANRSINCKRLPPSTKSRWQIKLNMLNFLKKLYPISDIVVEDIKAGTWKGAKKWNKSFSPLEVGKAWFYDKISKLGNLILKQGYETFERRNLLGLKKISRKLDEKFEVHNVDSWVLASYMTGKSSVDNVSLFRVIPLQLHRRQLHRFEPETGGVRKLYGGTRSMELRRGSVVNHTELGMVYVGGSSKGKISLHDLKSGRRLTQNGSCSDASFLYLNPWRTQFLPRLKPWVSLREGS

SEQ ID NO: 1164 - protein, 399 aa, Okeania sp.
MIRVPVQNPNGSPAMPTKASRVRRWIEEGKATEHWNDAGLYYVRLVAEPSGCQTQKIVIGCDPGKNYTGIAVQSAKLTLYTAHLVLPFERVKERLGSAVIKQGKVIKNVRGRALQRRVRRGRRINRKVPFNQRAHRQKRFDNRRKKGKLAPSIRASREMEIRIITELSKVFPITTIVYELVKADVDLTSSRKGARSGKGFSPVMVGQNWCVEKLKSIAPVKTKYGWQKNNNGTSQMPLAEELRFRKHLGLEKVKDKKAQVPESHAVDGIALAASEFVRYGVTPRKNCDTWGWKGSVNISPGVFRVITRSAYFRRALHFDNAEKGGIRKRKGGTITPFKVRLGDKVLAEKAGKIYIGWVGGFTDGKTKNISVYNHNWRRMGQFSPQKVQLIRRSNKLCVV

SEQ ID NO: 1165 - protein, 379 aa, Crocosphaera sp.; identical to SEQ ID NO: 255

SEQ ID NO: 1166 - protein, 371 aa, Scytonema sp.
MQRVPVLSKDGARLMPTKASRARRWLEQGKAKVVHNDLGIFQIQLLFDASGNEVQKIVIGVDPGKYYSGIAVQSVKFTLWMAHLQLPFETVTERMEQRAIMRRGRRGRRINRKLPFEYRAHRQKRFDNRRNSKIPPSIRANRDLEKRIIDELWQIFPFTKVVYEKVQARGDKGFSPVMVAQKWNLARLAEQGYEVSTIEGWQTANLRTHLGLHKQKHSKGDAIPATHAVDGVAIACSAFIRYGITSYNSQGWIGKVVVTSAPFTIIRRPPISRRQLHLQKPSKGGERRKYGGTTTRHGFRKGDYVEAVKAGKTYRGWVSGDTEKQVSVSDVDWKRLGQFTASKVRLIQRSTGLIVLSTRKLSNLTPLRGQI

SEQ ID NO: 1167 - protein, 393 aa, unidentified
  REGION 1..393: note = Candidatus Gracilibacteria bacterium
VNPRVPVQNPDGSAAMPAKASRARRWVRDGKAVGKWNDLGIYYVQLIQEPSGRKTQPVVCGIDPGKSYSGFGIQSAKATLFRGHAVLPFKRVKERLGAAVIKKSKVIKNLRGRALQRRARRGRRINRNLPFAQRCHRQKRFNNRTQFKLPPSIRASRLMEIRIVKELCAIFPVSKIVYEVIKADVDLTSGRKSARAGKGFSSVMAAQYWCIEQLQQLAPVKKMSGWQKDGNGTSQIRKYLGLFKDKHNKKNPVPETHAVDVVALAASEFIGFKPFYLSNSRGHDWKGMVAITDSVFRIITRPEYFRRALHFDNSQKGGIRKRKGGTITPFGFRGGDYVEGVKAGVTYRGWIGGYTNTNKYRYLSIYDVNWKRLGQFILSQVKLLRRANKLCIA

SEQ ID NO: 1168 - protein, 369 aa, Planktothrix sp.; identical to SEQ ID NO: 147

SEQ ID NO: 1169 - protein, 381 aa, Crocosphaera sp.; identical to SEQ ID NO: 454

SEQ ID NO: 1170 - protein, 342 aa, unidentified
  REGION 1..342: note = Candidatus Poribacteria bacterium
MFVPVKTKDGQQLMPLHAARARKLVKRGEATPYFNNGIYCIRLNKEPSDRDTQEIAVGVDPGSKKEGFTVKSEAHTYLNVQADAHNQVSKKVARRRELRRSRRSRKCPNRKQRTNRLANKVRIPAGTRARWDWKLRILDWFSKLFPVTHVCVEDIKARTIAHAKKWNTSFSPLEVGKQWFYSEVRKKWELLTLQGYETKEIRDKLGLKKSSKKSSEGFDAHCVDSWCLAYYTVGGDSSVDNTAVMCISPIPIARRNLHREQYKKGGIRSRYGGTVLCKGLVKNTLVKHIKYGLTRLAGINAKGLFSLYSLDGKRLTTSAKRMDFKVLRKLNFNYRIGHVSPS

SEQ ID NO: 1171 - protein, 356 aa, Chlorogloeopsis sp.; identical to SEQ ID NO: 256

SEQ ID NO: 1172 - protein, 370 aa, Moorea sp.
VNSNTFLVRFITMLRVPVISPDGRPLMPTKASRARRWINKGLAVVYQNDLNVFAVQLVNKPSGEETQDIAVGVDPGKLFSGIAVQSNKTTLWTGHLVLPYKKVRDRMDTRRMMRRTRRSRRINRKVCYSQRSHRQKRFSNRREKKVPPSIRANRQLEQRVIKELSLLYPLRVIVYEVVKARGSKGFSPVMVGQYWSISQLERIAPVIQKQGWETALKREALGLVKDKADKSRLSVNTHAVDGIALAATHFFRRKNYYHSNGKLSVPRNCDVTDATFYVIKRAPISRRQLHLLQFYKGGKRRKYGGTTTSHGFRKGDYVEAVKAGKQARGWVSGETARQVSVSDINWKRIGQFTARKVRLLKRSTGLIVNH

SEQ ID NO: 1173 - protein, 361 aa, unidentified; identical to SEQ ID NO: 1008
  REGION 1..361: note = Cyanobacteria bacterium sp.

SEQ ID NO: 1174 - protein, 372 aa, unidentified
  REGION 1..372: note = Cyanobacteria bacterium sp.
MSNTIRVPVQNPDGSPAMPTKSSRARAWVQRGLAIEVRNDLEIYGVRLLAEPSGRITQDIALGIDPGKMFTGIGLVSASSTLFKAHLQLPFKSVTKKMTTRRILRRARRGRRINRKLPYNQRCHRQKRFDNRRQNKLVPSIRANKQMELRVVRELLKLYPISHIVYERIEARGSKSFSPAMVGQKIMVGWLSELCPTTTQLGWQTSNLRQWLGLAKDKVNKANPTPETHSHDGIALATSHFIKWQDWVGNKARGGHWVGEIELTKCPFAVISRPQLYRRQLHFENPVKVSDSHPEHRKRKGGTVTPFGLRSGDKVKAEKAGQSYIGWIGGYVEKQKKVSVYDINWHRIGQFSVSKVQLVKRSTRLLSYVKVC

SEQ ID NO: 1175 - protein, 365 aa, Microcystis sp.; identical to SEQ ID NO: 594

SEQ ID NO: 1176 - protein, 362 aa, unidentified; identical to SEQ ID NO: 383
  REGION 1..362: note = wastewater metagenome

SEQ ID NO: 1177 - protein, 403 aa, unidentified; identical to SEQ ID NO: 370
  REGION 1..403: note = Cyanobacteria bacterium sp.

SEQ ID NO: 1178 - protein, 365 aa, Scytonema sp.
MRIPVVDQNHQPLMPTTPARARKWIESGKAIKRWSDSGQFYVQLTGEPSGRATQDIVIGIDPGKLYSGIGVQSAKFTLYTAHLILPFKTVRERMDARRLMRRARRGRRINRKAAFPARAHRQKRFDNRRQSKLAPSIRANRQLELRIVSELCKIYPVMEIRYEYVRAEVDLTSGRRKAKSGKGFSPVMVGQSWMLEQLANFAPVVKVEGYLTASTRKHLGLTKNKSQKSKAEFNTHAVDGVSIAATHFVEYRQDHKKGEDGAHWIGTIAITSAQLFVIRRPPYSRRQLHLMVPAKDGIRRKYGGTTTRHGFRKGDLVSSPKGIGYVSGDTEKQISVSEASWKRLGQIASSKIKLIRRSNGLVVAY

SEQ ID NO: 1179 - protein, 358 aa, Moorea sp.
MLRVPVISPDGKPLMPTKASRARRWLLCGLAVVYPNDLNVFAVQLVNQPSGNQTQDIAIGIDPGKMFSGMAVQSSKITLWTGHLILPYKKVRERMDTRRMMRKTRRSRRIDRKVAYSQRSHRQKRFSNRRVKRVPPSIRANRQLENRVTKELCFLYPVNVIVYEVVKARGSKGFSPVMVGQYWAISQLEQIAPVIQKQGWETALKREALGLIKDKTDKSQQTVNTHAVDGIALAATHFFRRKNYYHRNGKLSVPKNCDLTNAVFSVIRRAPISRRQLHLLQFSKGGKRRKYGGTTTSHGFRKGDYVEAVKAGITYRGWVSGQTVRQVSVSDVNWKRIGQFTARKVRLLKRSTGLIVNH

SEQ ID NO: 1180 - protein, 397 aa, unidentified
  REGION 1..397: note = Ga0315298_1001267
MGLEARQGASLALPPAGEPLNPMAGESASLSPVGFGEGKSNPGFRPGEPNRLRVPVVDARGMPLMPCTPARARLLLKKGKALARWNKLGVFYLQLKYAVEPKNQMLAVGVDPGSKYEALSVVGTKDTVLNMMSEAVDWVKKALEQRRRMRRARRYRKTRCRKCRGDNRRLEGKVPPSTKARWDAKLRIIAQLKRIMPISHVVVEDVKAITRRACRGWNGNFSLIEVGKQYFYSALKAIGLEVTAKSGNETKAFRERLGLKKIRNKSKPVFESQCVDSWCLATMVTGAKHPTTKSLHYVVPLKWHRRQLHRLEAEKGGIRRRYGGTTSLGLKKGTLVKHFKYGLCYIGGSLKNRLSLHSLKTGKRITQNAKREDIKILTRIAFRTQFLSTTEVGSFLG

SEQ ID NO: 1181 - protein, 288 aa, Tolypothrix sp.; identical to SEQ ID NO: 698

SEQ ID NO: 1182 - protein, 334 aa, unidentified
  REGION 1..334: note = Candidatus Poribacteria bacterium
MYVPVKSKEGKQLMPTTPPVARHLIKSGKATPYWSNGIFCIRLNYETEEYTQDIAVGVDPGSKKEGFTVKSDAHTYLNVQADAHKDVGKKVEKRRELRRGRRSRKCPNRKNRTNRLAQKKRIPAGTRARWEWKLRILDWLYKLYPITHVCVEDIKARTIERAKKWNQSFSPLEIGKQWFYTEVKKRWSLLTLQGWETKEIRDSLGLKKSKQKLSATFDAHCVDSWCLAYHSVGGASLPDNRDIFCISPIPIRRRELHRQNPQRGGKRPRYGGTMCLGIVKNTLVKHVKHGLLRVTGFDTRGGLNLSEISSCKRVVRGTKSDSFRVLTKLNFQYR

SEQ ID NO: 1183 - protein, 408 aa, unidentified
  REGION 1..408: note = Ga0315284_10084224
METMQTLTRLSSEGTTCVELQERQNASLILPSSGEPLNPMFPEGELSSTYIVEGKFNPSNRLGVEPNRFRVPVVDANNKPLMPCTSIRARILLKNHKAIARRNKLSIFYIQLKTNKEPTNQSIVLGVDPGSKFEGFSIVGTQDTVLNIMSEATTWVSKAVEQRRIMRKSRRSRKLRRRECRFNNYLKNKERLPPSIRARWNTKLRIIQQLKKILPINTIIVEDIRAITHKNGRIWNRSFSPLEVGKYYFYKQIGEKLVLNSGWETKMLRDSHDLKKLTNKSKSVFETHCVDSWVLAASISGAKQPTTRSLYYVVPLRFHRRQLHKLQPEKGGKRKLYGSTNSLGLKRGTLIKHPKYNLCYVGGSSKGKLSLHSIKNKKRLSKTTKKEDCKVLTRLSFRTQFLSCLKVR

SEQ ID NO: 1184 - protein, 349 aa, unidentified
  REGION 1..349: note = Ga0315280_10000556
MRVPVVSVDGKPLMPCKPSKARKLMRGRQAVGRRDKLGVFYLQMLRPVGNKVQGIALAVDPGSRFDGYAAASARETQVKGMVLLPKGIAGKMIRRSRLRRGRRSRKCRRRANRFNNRRKPKGWIAPSQKAKVDFRLKIVGELCRLYPIANIVIEDVCFNHYWKRWGKSFSTVEIGKTRVQEELKKIAPLMTVEGWETAEARRKYNIRKSYCRDALTPRSHANDAAAMLCRHFDRNVDSPTSFFVWSSHIPVRRQLHLQNFRRGVRRAYGGTTGRYGIRKGDFVEAKVKGKIVRGWACSFSDMQVGVADIRGKRFAIPTVNNVRLLHRRTVPCAEFNPTLNGRFSFGGIR

SEQ ID NO: 1185 - protein, 365 aa, Chlorogloeopsis sp.; identical to SEQ ID NO: 320

SEQ ID NO: 1186 - protein, 365 aa, Microcystis sp.; identical to SEQ ID NO: 739

SEQ ID NO: 1187 - protein, 344 aa, Nitrosococcus sp.; identical to SEQ ID NO: 971

SEQ ID NO: 1188 - protein, 365 aa, Microcystis sp.; identical to SEQ ID NO: 336

SEQ ID NO: 1189 - protein, 314 aa, Lyngbya sp.; identical to SEQ ID NO: 58

SEQ ID NO: 1190 - protein, 339 aa, Microcoleus sp.; identical to SEQ ID NO: 221

SEQ ID NO: 1191 - protein, 356 aa, unidentified
  REGION 1..356: note = Ga0307928_10038209
MFVSHCGSGYNSQLGDSMSEHSVFVLDVNGVPLTPCKPSKARKLLKGKQAKPIWNKFGRFGIQMLVETRKEHPETKHGYDLGTKFEGHSVVCGKENNLSVMWKLPDKKKIVRKLTKRRYLRHSRRFRNCRRRPARFDNRSKDGFIAPSQLVIVQSRLKALKELFRCYPIDISVVEDVKFNHRDKRWGKNFSTMEVGKTKLYNWIKERCKLILVKGHETQEKRKKLGYRKTKDKGAEKFTAHCTDALTLATDTTIMAGTFIVVDDTYRPVRRKLHDSRFSKGSIRYPYSTGNFKGIRKGTICEFGQICGGTKNNVWIRNRNNKRIGRVLYKIRWLSHNFKTSIPLPIKINSLLEAII

SEQ ID NO: 1192 - protein, 384 aa, unidentified
  REGION 1..384: note = metagenome
MESSRCPVVYKKLVLMPTTWRKARRVVKEGKGIFVRDKVLGIYLKLKYNPIKEGDKPNKNQQVVLGIDPGSWFDGFTVVSKSDNRNFQFNHQLPILSKLKGLMNKRKMYRRLRRYRLRHRPMRVDSRTGKKITNTGNYYFQNRVNMIHRIVNLYPITTISIEDVKFNHFISDRGGSFSNIEIGKIRLYDYIIRILKMNLIKCRGFDTKDMRETLFPDRTKDKDKSMRNFDSHCIDSYTIGILGYVDLTKDYRSFSYLPIKKSYSTSVRFIDRVKYLYRRELHRLKNKIRNSRFYFRYNPKGVKVVVDHKSKLKKSRFRSDSIRSNHGDIWSYSYTKPESTYKKFLARYGGSTITVGRSKCEYLGNPSKYWNGEFYRYYNIEVSY

SEQ ID NO: 1193 - protein, 290 aa, Planktothrix sp.
MRIPVVDQNNKPLMPTTPARARKWIESAKAVKRWSDCGQFYVQLTIEPSGYTTQNLVIGIDPGKKFSGIGVQSAKFTLYTAHLILPFQTVRERMDIRRLMRRGRRGRRINRKIEFSKRNHRQKRFNNRRQGKLPPSIRANRQLELRIVSELFRIYPVAEIRYEYVKADVDLTSGRKRAKSGKGFSPVMVGQKWMLSQLEKFAPVVRIEGYQTASTRKYLGLTKNKTDKSKPEFNTHAVDGVAIAATAFVEYRQYHTAKTDGANWFGDVVITTAQFRVIRKPPFSRRQLHL

SEQ ID NO: 1194 - protein, 369 aa, unidentified
  REGION 1..369: note = Oscillatoriales cyanobacterium
MGYTKMRIPVVDQNNKPLMPTTPARARKWIESGKAKKGWSDCGQFYVQLTVEPSGRATQNIVIGIDPGKLYSGIGVQSARFTLYTAHLILPFKLVRERMDARRLMRRNRRGRRINRKLEFSKRTHRQKRFNNRRQGKLAPSIRANRQLELRIVSELFKIYPVAEIRYEYVKADVDLTSGRKQAKSGKGFSPVMVGQKWMLSQLEKLAPVVKIEGYQTASTRKYLGLTKNKADKSKPEFNTHAVDGVAIAATAFVEYRQYHTAKIDGANWHGDVVITTAEFRVIRRPPFSRRQLHLMLPAKGGVRRKYGGSTTRHRFRKGDLVKSPKGVGYVSGDTERQVSVSDANWKRLGQITSSKVQLIRRSNGLIVT

SEQ ID NO: 1195 - protein, 397 aa, unidentified
  REGION 1..397: note = Cyanobacteria bacterium sp.
MRVPVISSDDQPLMPTKPSRARGWVREGKAKGFFKDLSQYCVQLLEEPTGTDTQSIAVGVDPGKKYSGLGVQSANYTLWKGHLILPFETVKKRMEQPRMMRRGRRGRRINRKLPYKQRAHRQKRFNHRRGHKLPASIRANRQLEYRVVKELTKVYPICAIYYEDVEAKGDKAFTPVMVGEKFMLQWLEKLAPTHTKLGWETASLRRDLKLEKSRNQGESTPASHAVDGIALASHSFRGMEKINGKNYRGQVWQGEVNLTESPFTVLRRPPVSRRQLHLMVEPLGGVRRKYGGTVTRHGFCKGDYVQASRKDQAFFGWVSGDTKSQVSVSNANWKRLGQFSTNKIRLLKHSTNLVKVMWIYARKWSNNEYNCYCPHLSPPERLVTLPRGAKKANSSSR

SEQ ID NO: 1196 - protein, 401 aa, Arthrospira sp.; identical to SEQ ID NO: 109

SEQ ID NO: 1197 - protein, 379 aa, Crocosphaera sp.; identical to SEQ ID NO: 613

SEQ ID NO: 1198 - protein, 379 aa, Crocosphaera sp.; identical to SEQ ID NO: 788

SEQ ID NO: 1199 - protein, 223 aa, Microcoleus sp.; identical to SEQ ID NO: 72

SEQ ID NO: 1200 - protein, 415 aa, unidentified
  REGION 1..415: note = Ga0373630_0001176
MVVAMQKLTSLSPTGTTPGELQERPDASPVRTSSAEPLNATPRRGLSSPCIGEGKSNLGHRDAIVSRVPVVSADGTPLMPCKPAKARKLLRDGKALKRWNRLGIFYIQLAFNPGNPTAQPIVAGVDPGSKFEGFSVVRTKDTVHNIMSEAVDWVKKALEQRRQMRRARRYRKTRSRKCRGDNRHSSAEGRVPPSTRARWDAKLRVIKQLQRILPISAAVVEDVKAETRRNHRRWNANFSPLEQGKQHFYSELRKSFQLITKEGWETEQLRKNYGLEKIEDKSRPIFESHCADAWALAASQTGAEHPTTRALYYLVPLRWHRRQLHRLEPDKGGVRRRYGGTVSLGLKKGTLVKHTKYGLCYIGGSLRDRFSLHSLKTGGRITQNAEGRPQDPDEDSIQNPFLPALKDGVSLGDFR

SEQ ID NO: 1201 - protein, 314 aa, uncultured Microcoleus sp.; identical to SEQ ID NO: 481

SEQ ID NO: 1202 - protein, 355 aa, unidentified
  REGION 1..355: note = Candidatus Poribacteria bacterium
MFVPVTSKSGKKLMPTNPNKAGVLIKKGFATPYWSNGIFCIRLNYDVKEYTQDVCVGVDPGSKKEGFTVRSESHTYLNVQADAHNKVGKKVAKRRELRRGRRSRKCPNRKHKKHNLSHRNRIPAGTRARWDWKLRILDWLSKLYPITHVCVEDIKARTIKRAKKWNQSFSPLEVGKQWFYGEIEKRWRLYTVGGHETKELRDRLGLKKSSNKLTETFDAHCVDSWCLAYHVLGGEPIVDYTHIFCISPLPIQRRNLHREVPKKGGVRSRYGGTRCLGVSKNTLVKHAKHGMLRVTGFDRDGLNLSELGSAKRIVRNAKQDTYRVLRKLNFRYKHVVSKPPKVKQNKLALQLSFNI

SEQ ID NO: 1203 - protein, 342 aa, unidentified; identical to SEQ ID NO: 822
  REGION 1..342: note = Sponge metagenome

SEQ ID NO: 1204 - protein, 372 aa, Scytonema sp.; identical to SEQ ID NO: 662

SEQ ID NO: 1205 - protein, 382 aa, unidentified
  REGION 1..382: note = Ga0315280_10000403
MELQERTDASLVCTSSEEPLNFTFPQRKLSSVHIVEGKFNPSNRLGAEPNRFRTPIVDIEDTLLMPCTSARARLLLKTGKALAKRNKLGMFYLQLNRAVDITNQPLVLGVDPGSKCEAFSVVGTKDTVLNIMSEATTWVSRAIEQRRNMRRARRFRKTRRRERRFNNRLANRKHVPPSTKARWDAKLRIISQLEKILPIQTVVVENIKAVTRKNGKRWNRSFSPLEVGKQHFYKQIGSKLVVKSGIETKALRESYGLEKLKNKSKPVFETHCVDAWVLAAQPTTRSLYYMVPLRWHRRQLHRLQPEKGGKRNRYGGTLSLGLKRGTLIKHQKYGLCFVGGFLNGQLSLHSMKNGERLTKNSKKEDCEVLTRIAFRTRFLAGC

SEQ ID NO: 1206 - protein, 392 aa, Brasilonema sp.; identical to SEQ ID NO: 684

SEQ ID NO: 1207 - protein, 344 aa, Richelia sp.; identical to SEQ ID NO: 367

SEQ ID NO: 1208 - protein, 365 aa, unidentified
  REGION 1..365: note = uncultured cyanobacterium
MIRVPVLDKNGKPMMPTKASRARRWLKEGKAKIVQNDLNIFGIQLLVEPSGYDTQSIALGLDPGKKFTGVGVQSVKFTLFMAHLILPFSDVTKKMDGRRLLRRARRGRRINRKVTFNQRAHRQKRFNNRKQNKLPPSIRANKELELRITKELVKLFPVTQITYEYIKAKGDKGFSPVMVGQKVMLEWLCEIAPTNTQEGWQTSILRQQLGLSKDKKDKSKQTPETHAHDGIALASSNFMRFEKFHTANSRGHRWVGFVAITPAPFRIIARPNLFRRQLHFENPVKDIPGNRKRKGGTITPFGLRSGDLVKAEKAGKFYIGWIGGYTQTPKTKNVSVYDHNWRRIGQFSPAKVQLIKRSTTLCVKA

SEQ ID NO: 1209 - protein, 353 aa, Trichocoleus sp.; identical to SEQ ID NO: 982

SEQ ID NO: 1210 - protein, 417 aa, unidentified; identical to SEQ ID NO: 639
  REGION 1..417: note = Ga0315285_10002437

SEQ ID NO: 1211 - protein, 360 aa, Hapalosiphonaceae sp.
MLRVSVLSPSGNPLMPTKASRARRWLKEGKARIVHNDLGIFQIQLLIEPSATNTQPIAIGIDPGKHYTGIGVQSAKFTLWMAHLQLPFKTVRERMEQRRMMRRGRRARRINRHFAFTKRAHRQKRFDNRKQRKVPPSIRANRELELRVVKELTTIYPITAITYEIIKARGDKGFSPVMVGQKWQLRNLETYAEVKQFEGWETANIRQHLGLHKQKHSKSDAISATHAVDGIALATSAFIRYGVTSFNSQGWIGEVTITPAPFAVIRRPPVSRRQLHLMVPAKGGVRRKYGGTVTRHGFRKGDYVEATQGNKTYFGWVSGDTEKQVSVSDQNWKRLGQFSKNKVRLIARSTGLIVTAVKTA

SEQ ID NO: 1212 - protein, 338 aa, unidentified; identical to SEQ ID NO: 416
  REGION 1..338: note = Oscillatoriales cyanobacterium

SEQ ID NO: 1213 - protein, 365 aa, Microcystis sp.; identical to SEQ ID NO: 696

SEQ ID NO: 1214 - protein, 397 aa, unidentified
  REGION 1..397: note = Ga0307928_10013595
MQKTTRTEPQELWSASLAPNPSAELLNATTSDVSDKDEAKSKFCSHLRSEYNSENRASMSGRVFVLGKDGKPLTPCKISKARKLLEGKQAEPVWNKFGMFGIQLLVDTRKETPKTVLGQDWGTKFEGYSLVSGKENLLNVMWKLPDKKKLVKKLEERRRLRRARRFRNCRRREARFDNRRRKGFIAPSQLQIVNSRLKCMDEFFKCYPISKVAIEDVKFNHRDKKYGKNFTTVELGKKMIFDHIRAKIGVENLILFGGMDTHTFREKLNLNKSSKKAEKKFSAHCVDSFVIANELSNATPNKSLVYVDDNYRFIRRRLHDTQFSKGNIRHKFSSGTFKGIRKGTMCEFGQIVGGTKEQAWYCDFELQKNGRKIYQKGKMLNKIEWLSHNYKSEMIAG

SEQ ID NO: 1215 - protein, 346 aa, Scytonema sp.; identical to SEQ ID NO: 36

SEQ ID NO: 1216 - protein, 594 aa, unidentified
  REGION 1..594: note = uncultured archaeon
MKGKRDRRPTPTSASLTVGWTDAVCLEHTDSSNPKEKMNDTASAFYLDGEGTSNKDKHLNEGSRIISQASNLTNKTNVTNKTNVTNKTNVTNKTNVTNKTNVTNKKNSPYGNNPKNTVPVYNKDNIRIYNTNENRAKKWIKQGKAKEIIINTKNKSGKPIKIFCIGLLGDPIGNIRVPVVNPDGTPGMPTKSSRARKWVKQGKAKPMRTKMGVFYVQLIQEPSGREKQPIVVTLDPGSRYSGVAVVSKKAVLYGCNLELIADEKENRFASIKYRMDKRRELRRSRRHRNCRRRECRVLNRTKTGKMAPSIRSRKQLELKVIKELKEIYPISIVGIEDVTFNHYTKRWGKNFSQVEIGKKWLFEELEKLFGKGNIRLIKGYETNIRRKQLKLEKGSKKEERGVISHVNDCIAMGSIILGLGMETKTKLRLGINFDIMCRPKYSRRKLHHEQPSKGGIRRRFGGTTASWTNIRKGDYIEAIIDKRDGNDMLYRGWVGGYENDKHLMSLYNFDWKVVGQFDSRNVRLLNRNHGLMIKSLDIEENRINICKYGTEQIGIDGGKVTMTTREKTTREKGKTAKDCLVDDTRQVSIDNAWK

SEQ ID NO: 1217 - protein, 348 aa, unidentified; identical to SEQ ID NO: 190
  REGION 1..348: note = fermentation metagenome

SEQ ID NO: 1218 - protein, 374 aa, Tychonema sp.; identical to SEQ ID NO: 917

SEQ ID NO: 1219 - protein, 364 aa, Microcystis sp.
MARVPVISKDGKPLMPTKPSRARRWIKEGKAIGKFNDLGIFYVQLIDEPSDSKTQPIAIGIDPGKLFSGIGVQSSLFTLWKAHLELPFKRVRERMDNRCLMRRGRRGRRINRQLPFNLRAHRQKRFLNRRQGKLAPSIRANRQLELRVVSELTKIYPITDIYFEYIKADVDLTSRRKGAKSGKGFSSVMVGQKWAIEQLSQLATVHTRFGWQTSNLRKYLRLEKSKNKAEQSPESHANDGIALACFQFLDYLPFHNSNGHGYDWKGSVKVTNAPFAVIKRPPISRRQLHLMVFSKGGKRRKYGGSTTRHGFRKGDLVSSPKGIGYVSGDTEKQLSVSDTSWKRLGQIAVSKIQLIRRSNGLIVS

SEQ ID NO: 1220 - protein, 333 aa, unidentified
  REGION 1..333: note = Ga0315277_10011256
VVPVVDKNSNPLMPTSSSKARRLIKDHRATYFYRKGIFCIRLNDDPSGYYKQPIACGIDPGSKWEAMTLKSKAHTYLNAQNDAVVWVKDAIETRREMRRGRRFRKTPCRKNKSHRSVPSGRLAPSTKARWGAKLRLVRIWRSIFPISDYIVEDICAATKPGQRRWNKSFSPLEVGKNWFYDELRKLGNLATKEGWETKNLRDALGLQKSKSNQQAFKAHCVDSWVLANSVVGGHQAPENTKILFLSPLRFKRRQLHKLQPAKNGERRREGGTISLGLKRGGLVNHPKYQICYVGGHMDGRISLHSLETGKRLTQSAKVADCKFLGYNSWRWTR

SEQ ID NO: 1221 - protein, 358 aa, unidentified; identical to SEQ ID NO: 567
  REGION 1..358: note = coral metagenome

SEQ ID NO: 1222 - protein, 341 aa, Ktedonobacter sp.; identical to SEQ ID NO: 632

SEQ ID NO: 1223 - protein, 337 aa, unidentified
  REGION 1..337: note = Ga0315273_10078206
MFVPVVNQQQEPLMPTTPSRAKRWIKSGKATPFFKKGIFCVRLNVEPSNQETQEIAVGIDPGSKKEGFTVKSLAHTYLNIQTDAVTWVKDAVEIRRNMRKARRSRNTPCRINRQNRKRGGLSPSTKARWQWKLRICNQLKRIFPIEVFVVEDIKARTWKGGKKWNQSFSPLEVGKSWFYNELEKLGKVELKQGYETKELRDLLWLKKTGKKTAEVFEAHCVDSWVLASSWVGGKVPDNKELLLITPLRFHRRQLHKLQPEKGGIRKRYGSTRSLGFKRGSIVRHPKYGITYIGGNSKNRISLHSLETGIRLCRTAKIEDCKFLTYNTERMRFIPKIN

SEQ ID NO: 1224 - protein, 344 aa, Scytonema sp.; identical to SEQ ID NO: 18

SEQ ID NO: 1225 - protein, 352 aa, Scytonema sp.; identical to SEQ ID NO: 23

SEQ ID NO: 1226 - protein, 348 aa, unidentified; identical to SEQ ID NO: 190
  REGION 1..348: note = fermentation metagenome

SEQ ID NO: 1227 - protein, 363 aa, unidentified
  REGION 1..363: note = Cyanobacteria bacterium sp.
MNPNTRIPVLAPDNAPLMPTLYRRAQQWVDSSQAEWVSNDLNIKQVRLFQEPSSRNAQPIVVGIDPGKKFSGIAVQSSLFTLFTAHLILPFPNITKKMTGRRILRRARRGRRINRKVAFHLRAHRQKRFDNRRQKKLVPSIRANREFELRIVKELMRLFPVSQIVYEYIEAKGDKAFSPVMVGQKVMLEWLSKLAPVTTQFGWETAKLRTHLKLVKQKSDKSVQSPQTHAVDGIALASSQFVEYRAYRRLKEDGYHWVGSVRITPSPFRVIARPNLFRRQLHFENFSTGRVRKRKGGTITPWGLRSGDFVQAQKAGRIYRGWIGGFSEVNKVVSVYDHNWHRIGQFSVSKVQLIKRSTRLCVA

SEQ ID NO: 1228 - protein, 366 aa, Richelia sp.; identical to SEQ ID NO: 985

SEQ ID NO: 1229 - protein, 386 aa, Scytonema sp.; identical to SEQ ID NO: 477

SEQ ID NO: 1230 - protein, 352 aa, unidentified; identical to SEQ ID NO: 550
  REGION 1..352: note = Candidatus Chloroploca asiatica

SEQ ID NO: 1231 - protein, 358 aa, Moorea sp.; identical to SEQ ID NO: 62

SEQ ID NO: 1232 - protein, 412 aa, Pleurocapsa sp.; identical to SEQ ID NO: 610

SEQ ID NO: 1233 - protein, 230 aa, cyanobacterium sp.
MYVPVVDRNQRPLMPTTPARAQRWIESGKATPFWKRGVFCVRLNVEPSNRNIQPIAVGIDPGSKREGFSVKSQAHTYLNILAHAVDWVKDAVETRRNMRRARRFRKTPYRQNRANRLVNTQRLPLSTKARWQWKLRICQWLSKMFPITAFVVEDIKARTWKNSRKWNVSFSPLEVGKTWFYNQLRQLGILETKSGMETKELRDSLGLSKTKNKLAEKFSAHNVDSWVLAN

SEQ ID NO: 1234 - protein, 330 aa, unidentified; identical to SEQ ID NO: 962
  REGION 1..330: note = Ga0315275_10032158

SEQ ID NO: 1235 - protein, 419 aa, unidentified
  REGION 1..419: note = Ga0315295_10005530
MSERTHTKPVRAGNGRLKTTEPTVRGRTSHVRDASQVLDLYVGQSRREKLHAVIEKSLHSPELRPVWVPVISSTGTPLMPCRPAYARALIKSGRAQRRWSKGIFAIKMLDRAEGVVQQIVVGIDPGSKREGMTIQSKQHTYLNVLSDAVTWVGDRVEVKRNMRRARRFRKTPCRTNKSNRNINCKRLPPSTKSRWQAKLRIINFLRKLYPISDYVVEDIKAKTLKGGKRWNTSFSPLEVGKAWFYNKVSKLGNLILKRGYETFEKRNQLDLKKSKEKMAETFDTHNVDSWVLASFVTGKNFVDNKGMFRMIPLQLHRRCLHRLEPGIGGVRSSYGGTMSMGLKRGSVVDHTKLGRVYIGGTMNGKISLHDLKSGKRLTQSGSCKDVKFLYHNSWKTQFLPRLKTARKASPPWVSLRGGS

SEQ ID NO: 1236 - protein, 402 aa, unidentified; identical to SEQ ID NO: 164
  REGION 1..402: note = Ga0373625_0144508

SEQ ID NO: 1237 - protein, 366 aa, Moorea sp.; identical to SEQ ID NO: 476

SEQ ID NO: 1238 - protein, 330 aa, unidentified; identical to SEQ ID NO: 962
  REGION 1..330: note = Ga0373627_0035378

SEQ ID NO: 1239 - protein, 385 aa, unidentified
  REGION 1..385: note = Marine metagenome
MNRVPVVSQDGKQLMPTQASRARKWVESGRAVGKWSDLGIYYVQLLEEPSGTETQPVAVGLDPGKSYSGVGVQSAQCTLLQLHLILPFGRVRARMDQRRLLRRGRRSRRINRDLPFKWRNHRQKRFDNRRGNKLAPSIRASRQLEIRVVKEIAAIYPVVAIGYEKVRADVDLTSGRKGARSGKGFSPVMVGQRWAISELEKIAPVYVREGWQKDGNGTSQLRTALGLVKDKQNKSEAKPETHSVDGVALACGDFIQYRSFHQGRNHGHAWFGQVQPTESLFKIITRPGAVKRGKEYGVFRRQLHFEVPSKSGVRRRKGGTVTPWGFRIGDLARSSKGKTESIGYIGGYSEANKVVSLYDWQWKRIGQFSVSKTTLIRRSNGLCVA

SEQ ID NO: 1240 - protein, 422 aa, unidentified
  REGION 1..422: note = Ga0373629_0019898
MVVSTQVLTRRPDSQSRVSGVEGYKNGRMRDLVLPSSSEPLNGTASRKGLSLPCSVEGHSTRTGEPAIGRVPVVSTNGKPLMPCRPSKARNLLKKGLAEKRWNKLGQFYLRLKFQPRSELNKDQQLCLAADTGSKWDGVAVISKKEVLTCGMLVLPSKVAEKLEQRRQIRRARRYRKTPRRAKRFDNRRRPDGWIAPSQKAKVDFRIKVVDEQSKIYPIDRFAVEDVRFNHYKKRWGKYFSTVEIGKAAFYKHLRRLGSLNLYTGVQTAEWRSKLSLPKNPVKRELSWDTHAVDAIAIGCAEVGCESPYPLEFWVWKRFEYARRQLHRLEPDKGDIRRRYGGSWSIPPFKKADVVMWRGRLARVGGYMDGTISLHAFTLKNKRITQDANPADCTCLYSQRIFYRQETLQFLPALKDGVSLGI

SEQ ID NO: 1241 - protein, 311 aa, Microcystis sp.
QPIAIGIDQGKLFSGIGVQSSLFTLWKAHLELPFKRVKERLDNRRLMRKGRRGRRINRQLPFNLRAHRQKRFSNRRQGKLAPSIRANRQLELRVVSELTKIYPITDIYFEYVKADVDLTSGRKGAKSGKGFSPVMVGQKWAIEQLSQLATVHTRFGWQTSNLRKYLRLEKSKNKAEQSPESHANDGIALACFQFLDYLPFHTSNGHGYDWKGYVKVTNAPFAVIKRPPVSRRQLHLMVFSKGGKRRKYGGSTTRHGFRKGDLVSSPKGIGYVSGDTEKQLSVSDTSGQRLGQIAVSKIQLIRRSNGLIVSH

SEQ ID NO: 1242 - protein, 372 aa, Calothrix sp.; identical to SEQ ID NO: 1069

SEQ ID NO: 1243 - protein, 430 aa, unidentified
  REGION 1..430: note = Ga0373627_0026263
MPGQSHVNNPTPISLGLQGVGMPSRNEQGKMETRVDKVGGRKAGGRSKSAESSARGGAKDVVGASQARNPSGGQPRWESTLKGSEGTSLTAGGVSPQWIPVLASIGVPLMPTRPRRARRLVESGRAVGKWKAGIYHIRMLDRDVGEVQPIAVGIDPGSKREGFTVKSERHTYLNILSDAVTDVKDRVEARRNVRRARRSRKTPCRANRENRARGGIPPSTKARWQAKLRIVNILYSLYPVKTWVVEDIKAKTRRGGKRWNISFSPLEVGKGWFYGEMMKRGELALKSGWDTKCMRDALGLVKTNGKMEERFSAHNVDSWVLAHSSVGGNGKSDNESIWRMVPLRFHRRQLHYFQPSSGGIRRAYGGTMSLGLKRGSLVRHPKWGTCYVGGNMGEKISLHQLTDGERVCRSAKKSDLKVLRFGSWRYSKVA

SEQ ID NO: 1244 - protein, 372 aa, Scytonema sp.; identical to SEQ ID NO: 662

SEQ ID NO: 1245 - protein, 395 aa, unidentified
  REGION 1..395: note = uncultured Methanomicrobiales archaeon
VKTKQQTTNGLKVPENTSLVLCTTSCAKADDKSLSKPVSHPRREKTCDRQGRISTQSDHSVFVLSKDGKALTPTTPARARKLLKGNQAKKCWSKFGTFGVRMIVEVGSKTPDTALGVDHGTKFEGYSVVVGTENLLNVKLDLPGKKVIVKKLTERRILRRARRHRNCRRRPARFSNRSRKGFIAPSQSVVVGSRLKVIGEFFRIYPINLVAFEDVRFNHAKHRWGKNFSTVEIGKTKIKDYFRSKGAKVFEYRGFETQEIRKKYGYTKTSSKSADKFSAHCSDSLSLAVNVTTGERIKPGEFIVVNDTYRCKRRRLHDTQPSKGNVREAYSKGTVFGLRKGLLVGLKKNKVGQLCGELKGKYRYYDSEGTRGLVSKLVWISSNFFTRKDGASSVA

SEQ ID NO: 1246 - protein, 365 aa, Microcystis sp.; identical to SEQ ID NO: 274

SEQ ID NO: 1247 - protein, 448 aa, unidentified
  REGION 1..448: note = activated sludge metagenome
MRVPVLDTHRNTLMPTTPKRARLLLKQGKARPYWNKLGIFCIILTYDVEPDNQPLAVGIDPGSSFEGWSVVGTKETVLNGMSEAPNHVKKAVETRRTMRRARRHRKCWRRPARFNNRLSGRKFIPPSTFARWNAKIRILDLLRKILPITDVVVEDVAAVSKKNCRKWNRNFSPLEVGKRWFYASIRELGLNLSLRTGYETKELRDRFGLKKSGQKDKKTFSSHAVDAWAMAADISGAEHPTETGLYYWTPIRVHRRQLHRFQPEKGGIRKPYGGTRSMGLTRGTLVRHIKYGLTYIGGTLKNRVSLHGFGTGKRVTQRARIEDCTFLTRIAWRTQWYAGTGRRHSSPHLLAGVSCLYEDEDKLVGMEDRPDPPIGLRVEVQAKVARDRKDPGAPDVVPSLIEPEELVEEDVVGAGRDEVVCVVKADQEDCVLLPEPGGDPLPDVVEVP

SEQ ID NO: 1248 - protein, 356 aa, unidentified
  REGION 1..356: note = Ga0373629_0001148
MVWIPIVSASGKPLMPCRPSKTRKLLTKGLAEKHWNRLGQFYLRLKFEPKSELNKSQQVCLAVDTGSKWDGMAVLSKKGVLTSGMLVLPSRVVEKLEQRREMRRARRYRKTPRRAKRFDNRRRPEGWIAPSQKSKVDFRINVVDELRKLYPVSVFAVEDVRFNHYKNHWGKFFSTVEIGKAKFYEHLRRFGELKLYSGIETTKFRERLSLPKNSRKSALEWNTHAVDAIAIGCADIGCPNPYPSEFWVWKRFEYARRQLHRLKPGKKGIRRRYGGSWSIPPFKKGDVVQHRRRLVRVGGFMDGRVSLHSFGLRNKRFTQNAKAEDCTRLFNQQVFNRREIPQFLPPINGVGFFGGF

SEQ ID NO: 1249 - protein, 426 aa, unidentified
  REGION 1..426: note = Ga0315280_10050744
MVVSAQELTRGLDSQSRASGVESYNNGTMRDLVVPTSGEPLNPTAGLKRGTSLSPPCSLEGHETLTGEPAIGEVPVVSATGNPLIPCRPSKARRLLVKGLAEKCWNRLGMFYLRLKFEPKSELNRNQQLCLAVDPGSKWDGAAVISKSEVLTCGMLVLPSRVAERLKRRQEMRRARRYRKTPRRAKRFDNRRRRKGWIAPSQKAKVDFRIKVVDGLCRIYPIDRFAVEDVRFNHYKKRRGKHFSTVEIGKAKFYEHLRKLGRPTLYDGVETAKQRERLGLQKNPVKRTLSWDTHAVDAIAIGCIEIGCSNPYPPEFWAWKRFEYARRQLHRLEPDKGGIRRRYGGSWSIPPFKKGDVVLYHGRLARVGGFMDGRVSLHSFGLRNKRFTQDADPNECTRLFNQQIFNRVERPQFLPPMNGVGFLEAV

SEQ ID NO: 1250 - protein, 316 aa, unidentified
  REGION 1..316: note = Blastocatellia bacterium
MQKVFVVDADDKPLLPCHPARARKLLDSGKAVVVSVIPFTIKLNRSVDNPTGSFTVGIDDGAKQVGVSIVNDKTNEVVFKGQIELRQDVSLLMEKRRNYRRARRYRKTRCRKSKFNNRTGAKILPSIRCRKDSIVRFIKDMSKRVRVTKAIVEEVKFNHAKHGYGNWFSLVEVGKSYLFNRLRCLGLTIEVVQGHKTKQWRIAIRLSKQHSRDAIAIVCQKAAPAIACKEWLIKPRGTKIWAGNPTKTCEEKNSFRHYDIVVAEHRTRGWVIGSIRSLKARVITLRTVFSDNFAVSYKKTRLLWRPKGLIYLTVVS

SEQ ID NO: 1251 - protein, 382 aa, Leptolyngbya sp.; identical to SEQ ID NO: 294

SEQ ID NO: 1252 - protein, 403 aa, Anabaena sp.
LDYLQDYLFSRWVEPRHFGLVGRGDLNFYSKDYLFMRVPVISAENIPLMPTKPSRARRWIQEGKAIGKFNKLGIFYVQLITEPSKTKAQEIVIGLDLGKMFSGIAVQTKKYTLQMLHLVLPFKTVKDRMEQRAMMRRSRRGRRINRKLSFNKRSHRQTRFENRRSSKLPPSVRANKDLEYRTITLLCDIYPVKTIIVEEVEARGNKSFSPVMVGQRYQINRLSELAKVTLKKGWETSNLRKYLGLHKEKLEKSLQIPETHAVDAVTLASSEFVKYQTWNDIKNHGASWVGNVTITESQFTILRRPPISRRQLHLMVFSKGGNRRKYGGTTTRHGFRKGDFVEATQGKKTFFAWVSGDTEKQVSVSDASWKRLGQCTAIKVRLIQRNTGLIVLSTRKMFNLTVS

SEQ ID NO: 1253 - protein, 408 aa, Kamptonema sp.
MLRVPVRSPDGKPLMPTKPSRARRWIRDGLAIGKWSDLGAFYVQLKNQPSGEKTQPIALGIDPGKRYSGVGVQSAKVTLFMSHLVLPFESIKDRMEQRRMMRRGRRGRRINRKIPYSQRAHRQVRFNNRRGNKLPPSIRANRQLELRVATELCRIYPISQIVYEYVKVDVDLTSGRKTAKKGVGFSPVMVGQKWMIKHLSKLSTTSTLYGWETAAIRQQLGLIKEKKAKSKRSPETHAVDGISLASSQFVRYRQLKGRLGWWDGFVSITPAPFIIIRRPPVSRRQLHLMIPTKGRKRRKYGGTTTRHGFRKGDLVKAEKAGRISIGWVSGDTQKLLSVSDINWKRLGQFSASKVQLLCRATGLLVSPQVICQLLGHSTPVAAIDVVSSPTWCAPVGVSTRIFLVNTHG

SEQ ID NO: 1254 - protein, 425 aa, unidentified
  REGION 1..425: note = Ga0373630_0100330
MVVTMQTLTRRLGCASIQVSGVEGYKNARVRDLALDNSPEPLNGTAARNGSLSLPYSVEGHSTWTGKSAIGRVPVVSADGKPLMPCRPSKARKLLEKGLAEKRWNKLGVFYLQLKFQPRSELNVNQQVCLAVDPGSKWDGVAAVSKKEVLTCGMLVLPSKVAEKLEQRRKMRRARRYRKTPRRAKRFDNRRRPEGWIAPSQKAKVDFRIKIVDELCRLYPVSRFAVEDVTFDHYKKRWGKHFSTVEIGKTTFYEHLRKLGELTLYTGVQTAEWRDKLGLPKNPVKRELSWNTHAVDAIAIGSAEIECENPYPPEFWVWKRFEYARRHLHRLEPDKGDIRRRYGGSWSIPPFRKGDVVMRHGRLARIGGFMGDGISLHSFGLRNKRFTQSADPSECTGLFNQQIFNRREIPQFLPPINEVGFLGGF

SEQ ID NO: 1255 - protein, 340 aa, unidentified
  REGION 1..340: note = Ga0315285_10002913
MFIPVIDSDHNPLMPTIPSRARRMIRSKEATPFFRKGVFHIRLNREPSNRKTQPVVVGIDPGSKKEAYTVKSEAHTYLNIQANAVIWVKERMDARRSLRRKRRNRKTPYRQPRLNRASLKKNRIPPSTKARWWWKLRICRQLAKMFPISSFIVENIKARQKSKRWWDVCFSPLEVGKNWFYTELDRIAPVETRQGFETKQLRDELGLEKLTNKMSENFHTHCVDSWVLANSLTGGHLIPDNTSVMLLSPIALFRRQLHVQQPVKGGKRRLFGGTRTLGFKRGSLVKHPKYGFVYVGGSKYNGKLSLHCLHTGERIYVYAKPEDLKFLSWNFWRQNWLKEK

SEQ ID NO: 1256 - protein, 343 aa, unidentified; identical to SEQ ID NO: 749
  REGION 1..343: note = Candidatus Poribacteria bacterium

SEQ ID NO: 1257 - protein, 360 aa, Sulfobacillus sp.
MRIAVVSVNGTPLSPTTPAKARKLIQSGGAQARRNKLGIFYLQLTTPTRENIPHETVAGIDPGKLYSGIGVQTPQATLWMGHLVLPFPYVKRRMTRRWHSRQFRRYRKTPQRPQRFRQRTGHKIPPSIKANRDLEWRVLQELAKIYPITQVVYEVVKARGTKSFSPVMVGQYWQMDRLASCFLLEPRYGWETAQLRFALGLEKTTKKSEQSPASHAVDGVALAASHFLHYVPFTEKNGDHGRRWEGTCQITPAPFAIIQRPQLLRRALHDQNPVRGGARERFGGTTTPWGFRKGDRVEGTKAGRIVRGYVSGYTNTNKKRNIAIVDARWKRLGQFAVSKVRLLGRSSRLLVSSVACARCR

SEQ ID NO: 1258 - protein, 351 aa, unidentified; identical to SEQ ID NO: 180
  REGION 1..351: note = Oscillatoriales cyanobacterium

SEQ ID NO: 1259 - protein, 351 aa, unidentified; identical to SEQ ID NO: 180
  REGION 1..351: note = Oscillatoriales cyanobacterium

SEQ ID NO: 1260 - protein, 378 aa, unidentified
  REGION 1..378: note = Terrestrial metagenome
MPWLTKTSLSSADNAEATITSIRKKGVSFMSRKPEEQPRVPVMSVDGKPLMPTTPKKARLMMRDGLAVPRRNKLGLFYIQMVRSVGEKVQPMAMAIDPGAKYDGVAVSSHKQVEMKAMVFLPEGVPGKMDARRRLRRARRFRNTPRRSPRFNNRKKKKYWLSPTQRSKVECRLKVVRELCKIYPIQLIITEDIRFNHARSRDGKYFSTVEVGKTLTYQEYKGLANLKLVDVSSTDAWRMKFGIEKCTEKKWEQTPETHANDAVAMLMGVTECREGAPPFYVWRRLQYVRRSLHRQNPQKGGVRHRFGGTANGVCLRKGDLVEAEKAGTVYLGWVCGLPTKATRIVGVAGADGKRVGQFNPKKVRLLARSTGFSWRKAI

SEQ ID NO: 1261 - protein, 355 aa, unidentified; identical to SEQ ID NO: 537
  REGION 1..355: note = Candidatus Poribacteria bacterium

SEQ ID NO: 1262 - protein, 365 aa, Microcystis sp.; identical to SEQ ID NO: 335

SEQ ID NO: 1263 - protein, 344 aa, unidentified; identical to SEQ ID NO: 427
  REGION 1..344: note = Oscillatoriales cyanobacterium

SEQ ID NO: 1264 - protein, 309 aa, unidentified; identical to SEQ ID NO: 1111
  REGION 1..309: note = Ga0315284_10000891

SEQ ID NO: 1265 - protein, 422 aa, unidentified
  REGION 1..422: note = Candidatus Methanoculleus thermohydrogenotrophicum
LRTAKRDQTVDQEATNRLQQRFGLHERMGASLACPSSGHAKTRRALWSTKPIPQLRREMQLRFDREGVIPAMRVPVSDTNRRPLMPTTPARARLLLKQGKAKPYRNKLGIFCIIPTYAVEPDNQPLVVGLDPGSSFEGWSVVGTRETVANGMLEAPKHVKKAIGTRRTLRRARRHRKCWRRPARFNNRLSGRRLLPPSTFARWNTRIRILDQLQTILPITDVVVEDVFAVTVAKKNCRRWNENLSPLEVGKQWFYQATRDRGLDLHLRAGYERKELRERFGLKKTKQKSKPVFAAHAVDAWVIAADVPGAECPAEQGLYYWTPIRFFRRQLHRLQPAKNGEIRKPYGGTRSPGLSRGTLVRHVKHGLTYIGGSSKGKMTLPNAVTGGWVTQTAKMEDCMILTRIAWRTERYAGMGRRHSSPA

SEQ ID NO: 1266 - protein, 344 aa, Coleofasciculus sp.
VFVPVVDSQNKPLMPTTPSRAKRWIKSGKATPFWKKGVFCVRLNVQPSSTNRQPIAVGIDPGSKREGFTVKSQAHTYLNVQTHVVDWVKDHVEVRRNMRRARRFRNTPCRQNRANRLVNKNRIPPSTKARWQWKLRIANWLTKMFSVSTFAVEDIKARTWKNGRKWNALFSPLEVGKQWFYSELRKSAHVETKSGNDTCELRKSLGLKKSKQKLSNKFEAHCVDSWVLANWYVGGHNAPDNTTLIEIIPLEFHRRQLHRLQHSAGHVRSRYGGTLSAGFKRGSIAKHPKYGFCYVGGWQESPTKKDPNRKTISLHSLNTGKRLCQNAAPTDCKFLSYNSWRIAN

SEQ ID NO: 1267 - protein, 422 aa, unidentified
  REGION 1..422: note = Ga0315280_10012508
MVVLRQQLTSRLGKDRVSGVVDYKNGRVRDLALPTSGEPLNPAVGHKINLSQPCNDEGRSTLTGETVIGKVSVISASGKPLMPCRPSKARRLLAKGLAKKRWNRLGIFYLQLKFEPKSELNKDQEVCLAVDTGSKWDGVAVLSSKRVLASGMLILPSKVAEKLEQRRHMRRARRYRKTPRRAERFDNRRRPEGWIAPSQKAKVDFRIKVVDELCKIYPVSQFAVEDVRFNHYKKRWGKDFSTVEIGKARFYQYLKELGKLSLYNGVETAKYREELGLQKNPVKRELSWDTHVDAIAIGCREIGCRNPYPSDFWVWKRFEGAKRQLHRLEPDRGGIRRRYGGSWSITPFKKADVVLWHGKVARVGGFMDGRISLHRFGLKNRRFTQTAKPEECKRLFNQQIFSKQEEPQFLPPITGVVFLEVI

SEQ ID NO: 1268 - protein, 344 aa, unidentified; identical to SEQ ID NO: 575
  REGION 1..344: note = Oscillatoriales cyanobacterium

SEQ ID NO: 1269 - protein, 360 aa, Moorea sp.; identical to SEQ ID NO: 60

SEQ ID NO: 1270 - protein, 379 aa, Chlorogloea sp.; identical to SEQ ID NO: 507

SEQ ID NO: 1271 - protein, 365 aa, Microcystis sp.; identical to SEQ ID NO: 336

SEQ ID NO: 1272 - protein, 369 aa, Brasilonema sp.; identical to SEQ ID NO: 83

SEQ ID NO: 1273 - protein, 300 aa, unidentified
  REGION 1..300: note = Cyanobacteria bacterium sp.
MQSIPVVDINQRPLMPTTASRAKRWIQSGKATPFWKRGVFCVRLNVEPSSRFTQPIAVGIDPGSKREAFTVKSATKTYLNVQTRAVDWVKDAVEAKRNARRSRRYRNTPYRAICKNRQRGGIPPSTKARWQWKLRICNWLTKLFPVSAFVVEDIKAKTFKNGRKWNVMFSPLEVGKRWFYGELARITPVHIKQGTEGHDKPDNTRLIVIVPLRFHRRQLHRFQPSQGGIRSPYGGTMSEGFKRGGIAKHPKYGVVYIGGASKGKVSLHSIATGKRLTQGAKPVDIKFLSYSSWRLAGVGG

SEQ ID NO: 1274 - protein, 334 aa, unidentified
  REGION 1..334: note = Candidatus Poribacteria bacterium
MYVPVKSKEGKQLMPTTPPVARHLIKSGKATPYWSNGIFCIRLNYETSEYTQAIAVGVDPGSKKEGFTVKSISHTYLNVQADAHKDVGKKIEKRRELRRSRRSRKCPNRKNRTNRLAHKERIPAGTRARWEWKLRILDWLSKLYPITYVCVEDIKARSIERAKKWNQSFSPLEVGKQWFYTEVKKRWSLLTLQGWKTKEIRDSLGLKKSKQKLSATFAAHCVDSWCLSYHIVGGASIPDNRDIFCISPIPMRRRELHRQNPQRGGKRPRYGGTMCLGIVKNTLVKHVKHGFLRVTGYDTRGGINLSEISSCKRVVRGAKSDSFRILTKLNFQYR

SEQ ID NO: 1275 - protein, 336 aa, Kouleothrix sp.
MQPFIPVISANGKRLMPTTNRKADRLIASGRALRRFSRGLFYIQLTDRADGYTQPIAVGIDSGSKKEAFTVQSTAHTFLNVQADAVTWVKEHIKTRRQMRRVRRYRKTPCRACRPNRLRGRICLPPSTRARWDWKLRLLRWLARHYPITDVVIEGIAATTRKGKRRWNESFSPLQVGKLWFYGQVEQIAELTVVPSRFTSGLRDQAGLVKSRAKLSDRWDAHCVDSFVLASYRVGGPSRPGSTAMLYITPLQFHRRQLHRLQPEKGGKRKPYGGTISLGLKRGSWVRHPRYGIVYVGGTRAEGSLSLHELQTGKRLTTHAKVGDCQFLCTASWRVR

SEQ ID NO: 1276 - protein, 355 aa, Desulfotomaculum sp.; identical to SEQ ID NO: 1135

SEQ ID NO: 1277 - protein, 343 aa, unidentified
  REGION 1..343: note = Ga0373626_0073864
MPCRPSKARKLLSLNLAEKCWNRLGQFYLRLRFDPKSEPNRGQPVCLAVDTGSKWDGLAVVTRKKVLTTAELVLPQGIAKKLETRRQMRRARRYRKTPRRAERFDNRRRPEGWIAPSQKAKVDFRIKIVDGLCRLYPVDRFAVEDVRFDHYRKRWGKHFSTVEIGKTRFYEYLRSIGRLNLYAGAETAEWRKKLKLPKNSRKSALRWDAHASDAVAIGCAETGCTDPAPPEFWVWRRFQYARRQLHRLEPNKGGVRVRYGGSRSVYPFRKADVVVWHGQLFRVGGFMGKHLALHAFTLKNERVTQNAGPEDCKRLFNQRIFCRQEMPQFLPSLKGRGLLGGFQ

SEQ ID NO: 1278 - protein, 405 aa, unidentified
  REGION 1..405: note = Ga0373629_0071313
MSETTIEGLQELQDTPQVLNYSEEPLNSMSLENATNSSDNSIPFSHFGCGCNNNSVGSMSSNRVFVLSISGKPLTPCKSSKARKLLKGKVAKPVWNKFGLFGIQMLIETRKEVPKFILGCDFGTKFEGYSVVSEKENNLNVMWKLPDKKTVVRKLKERRQMRRARRFRNCRRRECRFDNRKIDGFIAPSQLVIVNSRLKCLKELFKCYPISKVAIEDVKFNHRDNRWGKNFSTVEIGKKTIKDFLVNEVGRENYLIFNGFETKELREKKKLKKSTNKSAEHFYSHCVDSFVIASVIANNPIHTDDILIVDDTYRPVRRRLHDTQFKKGGIREKYSTGNFKGTRKGTVCEFGQIVGGTKNNFWIRDLENKRIGKVSTKISWLSHKFKVAIHPPIEIGGLLATEVRL

SEQ ID NO: 1279 - protein, 297 aa, unidentified
  REGION 1..297: note = Ga0315279_10001675
VQGNCLRRNKPSDRKYQDVVVGVDVGSKREAYTVATVNHVVLNILTNTPDWVKASVKTRREMRRGRRNRKTPRRKNRSNRAIGKLAPSTKARWQAKLRVLNWLSTLYPITDVVVEDVKATTRKGSKKWNMSFSPLEVGKVWLYTEIKKFWNLYLVHGYETKEWRDMSKYKKSSNKLNDCWEAHNVDSHVLCEIGLGGCIKSFKKILRLEFLHLHRRQLHVLQFAKEGIRKLYGGTRSMGFKRGSWIKHIKYGLCYIGGTSKERVSLHEMSTGKRLTQTAKPEDCRFLTYATWRMSYV

SEQ ID NO: 1280 - protein, 381 aa, Crocosphaera sp.; identical to SEQ ID NO: 454

SEQ ID NO: 1281 - protein, 337 aa, Microcystis sp.; identical to SEQ ID NO: 789

SEQ ID NO: 1282 - protein, 338 aa, unidentified
  REGION 1..338: note = Ardenticatenales bacterium
MQYVPVVSSIGKPLMPCHAARARQLVKQGRAMRRFNKGIFFIQLVDRADGAVQPIAVGVDPGSKREGVTVKSEFHTYLNVQAEAVDWVSKHVEVRKILRRGRRGRKTPYRKNRKNRARGGIPPGTKARWQLKLRVLQWLAALYPISLVVVEDIAAVTKAVGSLWVRRWNQSFSPLEVGKAWFYGEVAKMAELWTFTGHQTAEMRHAMGLTKSKQKLSTVWEAHCVDSFVLANIVIGGHVEPDNKEMLILVPLQLHRRALHRANPQKGGVRPPYGGTKSMGFKRGSWVKHPQWGVCYVGGTSKGRISLHSLTTGKRLTQSAKPEACQFLCYASWRVFHT

SEQ ID NO: 1283 - protein, 343 aa, unidentified
  REGION 1..343: note = wastewater metagenome
MLYVPVVSSTGKPLMPCHPARVRELVRKGRAVRRFDRGMFYIRLLDRAEGDVQPVACGIDPGSKKEGFTVKSEACTYLNLQADAVTWVKDALETRRNMRRARRYRKTPYRAPRFNRSRGSLSPSIKARWQWKLRICRWLSRLFPIETFVVEDIKAHTRGGRRWNRSFSPLQVGKAWFYGELRKLGCVETKQGYETKELRDAHGLKKTSRKLADVFEAHCVDSWVLGNWWTGGHTSPDNTRMMCITPLRFHRRQLHRLQPEKGGVRKPYGSTHSHGFKRGSLVKHPKWGITYVGGVLKDRISLHRIVDGKRLCQNARPLDCKFLAFNSWRTRLLPGIHAGVSAA

SEQ ID NO: 1284 - protein, 364 aa, Merismopedia sp.; identical to SEQ ID NO: 686

SEQ ID NO: 1285 - protein, 351 aa, unidentified; identical to SEQ ID NO: 180
  REGION 1..351: note = Oscillatoriales cyanobacterium

SEQ ID NO: 1286 - protein, 331 aa, Limnoraphis sp.; identical to SEQ ID NO: 437

SEQ ID NO: 1287 - protein, 402 aa, Scytonema sp.; identical to SEQ ID NO: 606

SEQ ID NO: 1288 - protein, 349 aa, unidentified
  REGION 1..349: note = Ga0315280_10043499
MDIPVVSKSGTPLMPCKPSKARKLLERNLAEKCWNRLGQFYLRLKFNPKSPNNGQHVCLAVDTGSRWDGMAVVTKERVLTTAELVLPSRITGKLETRRQMRRARRYRKTPRRAKRFNNRRRPEGWLAPSQTAKVNFRVKIVDELCRLYPIDRFAVEDVRFNHYQKRRGKHFSTVEIGKTRFYEHLRGIGHLSLYAGVETAEWRKKLKLPKNQRKSALKWDAHASDAVAIGCAEMGCTNPAPPEFWVWRRFQYARRQLHRFEPNNGGTRVRYGGSRSVYPFRKADVVVWHGQLFRVGGFTSKRISLHAFTLKNERVTQNAKPEDCTRRFNQRIFSQFLPRLKPWVSLEES

SEQ ID NO: 1289 - protein, 425 aa, unidentified
  REGION 1..425: note = Ga0315280_10014824
MVVATKVLTRGPEKGRGVVGYKDVGMRDLVPTSPAEPLNATVERRRDLSPRCSLEGRSTECNRQPAIGIVRVPVVSASGEPLMPCRPSKARKLLARNLAEKRWNRLGQFYLRLKFDPKSESNRGQHVCLAIDTGSKWDGMAVVTKKQVLTTAELVLPSGIAEKLETRRRMRRMRRYRNTPHRAKRFDNRRRPEGWLAPSQKAKVDFRIKIVDDLCKIYPIDRFAVEDVRFNHYRKRWEKFFSTVEIGKVKFYGHLRKLGDLRLYSGVETAEWREKLNLPKNSRKSALEWDAHASDAVAIGCAEMGCDSPVPPEFWVWKRFQNARRQLHRFEPEKGGIRRRYGGSMSVSPFKKGDAVIWRGRLARVGGYMDEGISLHAFTLKNKRITQAAKPEDCMRLFNQSIFYKQETPQFLPSLKEGVSLGDLR

SEQ ID NO: 1290 - protein, 356 aa, unidentified
  REGION 1..356: note = Candidatus Poribacteria bacterium
MGKHIPCKGEYKLMFVPVKTKDGQQLMPLHAARARKLIKRSEATPYWNNGIYCIRLNKEPSDRDIQDIVVGVDPGSKKEGFTVKSEKHTYLNVQVDAHSHVSKKVAKRRELRRNRRSRKCPNRKNRMNRLANKERIPAGTRARWDWKLRILHWLSNLYPIRHVCVEDIKAPTIERAKKWNTSFSPLEVGKQWFYSEIRKRWELLTLQGWQTKEIRERLGLKKSSEKMSETFDAHCVDNWCLAYHSVGGANIPDNTDIFCIAPIPIKRRCLHREQEAKGGQRNRYGGTVLGNGLIKNTLIKHVNYGLTRLAGVNAKGLFSIYNLAGNKRLTTSAKRNSFTILTRLNFNYRSGHSSPS

SEQ ID NO: 1291 - protein, 344 aa, unidentified; identical to SEQ ID NO: 427
  REGION 1..344: note = Oscillatoriales cyanobacterium

SEQ ID NO: 1292 - protein, 370 aa, Pleurocapsa sp.; identical to SEQ ID NO: 1112

SEQ ID NO: 1293 - protein, 343 aa, unidentified
  REGION 1..343: note = Ardenticatenales bacterium
MQYVPVVSSIGKPLMPCHAARARQLIRKGRAVGRFNKGIYYLQLLDRADGVIQPIAVGVDPGSKREGFTIKSETHTYLNVQAEAVDWVGKHVEIRKILRRGRRYRQTPYRQNRQNRARGGIPPSTKARWQLKLRVLKWLAALYPISIVVVEDIAAVTKAGKRRWNSSFSPLEVGKAWFYHEVEKMAELWTFKGYQTAAMRQVMGLKKSRQKLATTWDAHCVDSFVLATLVIGGHVEPDNKEMLILVPLQLHRRALHRANPQKGGVRPPYGGTKSLGFKRGSWVKHPTWGVCYVGGASKGRISLHSLATGCPLGEAAYPNRETRGVSIPVLCQLARLSCLIGDR

SEQ ID NO: 1294 - protein, 388 aa, Symploca sp.; identical to SEQ ID NO: 225

SEQ ID NO: 1295 - protein, 365 aa, Planktothrix sp.; identical to SEQ ID NO: 112

SEQ ID NO: 1296 - protein, 300 aa, unidentified; identical to SEQ ID NO: 381
  REGION 1..300: note = uncultured cyanobacterium

SEQ ID NO: 1297 - protein, 364 aa, unidentified; identical to SEQ ID NO: 1035
  REGION 1..364: note = Oscillatoriales bacterium UBA8482

SEQ ID NO: 1298 - protein, 365 aa, Chlorogloeopsis sp.; identical to SEQ ID NO: 320

SEQ ID NO: 1299 - protein, 430 aa, unidentified
  REGION 1..430: note = Ga0315294_10112621
MQTLTSLSKEPHVGGRCATLTELQERTGASLACTSSAEPLNAAASTAAGLSSVGIGEEKHDHGHWDEIVTRVPTVSADGTPLMPCRPAKARKLLRNGRAVRKWSKLGVFYIQLRFNPEQPATQPLVVGVDPGSKFEAVSIVGTEDTVLNIMSEAVDWVKATLQQRREMRRARRYRKTRCRPCRINNRLRSQRRGDPPPSTKARWDAKLRIIAQLRKIIPIQQAVVEDIKAETREGQRRWNQSFSPLEVGKQYFYSQLRHMGFKVETKIGTETQDLRVKFNLRKASDKSRPVFESHCVDAWCLAASVTGAKHPTTRSLYYTVPLRWHRRQLHRLEPDSGGIRRRYGGTVSLSLKKGTLVKHVKYGFCYVGGNLKDRASLHDLKTGKRLTQNAKKQNLKTLTRIAFRTQFFPSADTETRNSSPCLKAGVSLR

SEQ ID NO: 1300 - protein, 268 aa, unidentified
  REGION 1..268: note = Cyanobacteria bacterium sp.
MRVPVISSDEQPLMPTKPSRARGWVREGKAKGFFKDLSQYCVQLLEEPTGTDTQSIAVGVDPGKKYSGLGVQSANYTLWKGHLILPFETVKKRMEQPRMMRRGRRGRRINRKLPYKQRAHRQKRFNHRRGHKLPASIRANRQLEYRVVKELTKVYPICAIYYEDVEAKGDKAFTPVMVGEKFMLQWLEQLAPTHTKLGWETASLRRDLKLEKSRNQGESTPASHAVDGIALASHSFRGMEKINGKNYRGQVWQGEVNLTESPFTVLRR

SEQ ID NO: 1301 - protein, 379 aa, Crocosphaera sp.; identical to SEQ ID NO: 1157

SEQ ID NO: 1302 - protein, 341 aa, unidentified; identical to SEQ ID NO: 347
  REGION 1..341: note = Candidatus Poribacteria bacterium

SEQ ID NO: 1303 - protein, 340 aa, unidentified; identical to SEQ ID NO: 1079
  REGION 1..340: note = Microcoleaceae bacterium UBA9251

SEQ ID NO: 1304 - protein, 211 aa, Richelia sp.; identical to SEQ ID NO: 331

SEQ ID NO: 1305 - protein, 418 aa, Scytonema sp.
MQKENARVPVISTDCEPLMPTTASRARRWIKQGKAKSFWNDLSIWCVQLLVEPSGTKTQSIVVGSDPGKRYSGIAIQSAKYTLFMSHIVLMGFIPKQGTAIAGIKEKMLYLSMLRCGRRGRRINRSKAFKLRNHRENRFSNRKKIKLAPSIRSNRQLEIRVISELARIYPISEIRVEKVRADVDKTSGRKGAKSGKGFSPVMVGQGWMIEQLSRIATVVTIEGWHKDGNGTSQVRQYLKLIKNKSDKALQAPETHAVDAVVIAATNFVQYKPFYTGSTHGCIWVGEVAITPAVFKVISKPRMTRRRLHDAVPGKGGIRERYGGSTTPFKARKGDLILYLTKSKGEIKKMIGYCSGYTGKNLSLSDANWSRLGRFADSKCRILSRNTGLVISGTLSPTQLPSYPPTTISVSFGRSTSEV

SEQ ID NO: 1306 - protein, 353 aa, Desulfovirgula sp.; identical to SEQ ID NO: 300

SEQ ID NO: 1307 - protein, 342 aa, unidentified
  REGION 1..342: note = Ardenticatenales bacterium
MQYVPVQSSTGKPLMPCHAARARELVRKGRAVGRFNKGIYYIRLLDRADGEVQPIAVGVDPGSKREGFTVKSETHTYLNVQAEAVDWVGKHMEVRKMLRRGRRSRKTPYRKQRQNRARGGIPPSTKARWHLKLRVLQWLAVLYPLSIVVVEDIAAVPKEGKHRWNKSFSPLEVGKAWFYREVEKMAELWTFKGYQTAEMRQAMDLKKSSQKLSTTWEAHCVDSFVLATIVIGGPVEPDNKEMLILVPLQLHRRALHRANPQKGGVRPPYGGTKSMGFKRGSWVKHPKWGVCYVGGASVGKGGISLHSLTTGKRLTQSARPEACHFLCHASWRVFHARQVGCQ

SEQ ID NO: 1308 - protein, 365 aa, Microcystis sp.; identical to SEQ ID NO: 334

SEQ ID NO: 1309 - protein, 338 aa, unidentified; identical to SEQ ID NO: 420
  REGION 1..338: note = Oscillatoriales cyanobacterium

SEQ ID NO: 1310 - protein, 340 aa, unidentified
  REGION 1..340: note = Ga0315284_10000823
MFVPVVDRNNKPLMPTRIGRAKRWVISGKGTFFWKSYTLCVRLNVDPSDEQKQDIAVGIDPGSKREAYTVKSKGHTYLNLLTETIDWIKDSLEVRRNMRKSRRSRNCRRRECRFLNRHKSKLPPSTKSRWQLKINIVKNLFKALPITDIVVEDICAKTKFRKRKWNVSFSPLEVGKKWFYDQMSKCGPLTIIQGHETKRLRDSLNLKKDKNKLSDSFDSHNVDSWVLANFIVGGHTEPDNINLLKFVPLRFHRRQLHVLLLKHGKRKNYGGTMSLGFKRGSLVKHKKYNVVYVGGTMNDNISVHEISTGKRISQKVKVSDCKFLTFCSIRIGLVPLSVIT

SEQ ID NO: 1311 - protein, 378 aa, unidentified; identical to SEQ ID NO: 390
  REGION 1..378: note = Cyanobacteria bacterium sp.

SEQ ID NO: 1312 - protein, 370 aa, unidentified
  REGION 1..370: note = uncultured Opitutae bacterium
MPVIFQGQPLMPMKASRVRRFVKTGQARIRYDCKLGLHYLQLLVAPSGGETQEMTIGLDPGSTFDGFSVVSADTHHLNIELIQRPKQGKNSIKSFKNRQASNRRVRRSRLCHRPIRFSNRKSNKMAPTIRANVEYRQWLITGLCQYFPISRAVVEDVKFNHYEKDNGKSFSHVEIGKNALYAFIESLGISLVLIEGWQTKRLRVNSFGSDPKLQDKGAKSFEAHCVDSFVIACESDRMIDLSTGELLENEPFIVFDQNKINRKVTFIEKIVKQRRSLTRTRALYKDKWQYFRYAKGGEKVFFTNISNKDNVCRVKPPEEHSNHPKAWQYIDNGRAEKVKCNTAKYGGTVINGKQKFFNNNQWENRKLWKN

SEQ ID NO: 1313 - protein, 357 aa, unidentified; identical to SEQ ID NO: 901
  REGION 1..357: note = Ga0373626_0107639

SEQ ID NO: 1314 - protein, 400 aa, unidentified
  REGION 1..400: note = Ga0307928_10000796
MPETTDVGLQERQGTSLTLTVSEESFNSTNQNTPNHREDSKPDVHVQSGYNSVSINRNGARMSGHNVFVIGGDGKPLTPTTNAKARKLLKGKQAKSVWNKFGRFGIKMLVKTRNHHPETKHGYDVGTKFEGHAVVCGKENNLSIMWKLPDKKKVVRKLTERRQLRRARRFRNCRRRPARFDNRNKDGFIAPSQLVILQSRLKALSELFRCYPIDISVVEDVKFNHRDKRWGKNFSTMEVAKNKMYAWIKERCKLVLVEGHETQKKRKVLGYRKTRDKGAEKFTAHCTDALTLATDVTIMSGDFIVVDDTYRPVRRRLHDTQFSKDGIRYPYSSGNFKGIRKGAICEFGQICGGTKNNVWIRNGDNKRIGRALSKIGWLSHKFKTSIPPPIKMSGLLEVIL

SEQ ID NO: 1315 - protein, 358 aa, Mastigocoleus sp.; identical to SEQ ID NO: 426

SEQ ID NO: 1316 - protein, 340 aa, unidentified; identical to SEQ ID NO: 1079
  REGION 1..340: note = Microbial mat metagenome

SEQ ID NO: 1317 - protein, 338 aa, unidentified
  REGION 1..338: note = Ga0315294_10113088
MSYVPVVGSGGRPLMPCTTWRANELIRKGRAARRFSKGIFYIRLMDRAEGVVQPVACGIDPGSKFEGYTVKSGKTTYLNVQADAVTWVKDAVEVRRNMRRNRRLRKTPCRKNRLNRSRGGLAPSAKARWQWKLRLSRWLASLYPISVFVVEDIKAKTKGQRKWDASFSPLECGKHWFYAELNQIAPVQTKSGWDTKTMRDALNLKKIGNKAAKHFGAHCVDSWVLASSAVGGVKPDNTDIRFVTPLRFHRRQLHALQPTKGGIRRPYGGTQSLGFKRGSLVKHPKWDLCYVGGTSNGRISLHSLEDGRRLCRRVKTTECDFFFRLSWRTMGGGASSVA

SEQ ID NO: 1318 - protein, 365 aa, Microcystis sp.; identical to SEQ ID NO: 473

SEQ ID NO: 1319 - protein, 360 aa, Sulfobacillus sp.
MRVPVVSLHGNPLSPTTPAKARKLLRSGGAVPKRNALGTFFIQLTHPTREEIPHDTVVGIDPGKLYSGVSVQTPQATLWMGHLVLPFPLVQKAMADRRQSRRFRRYRKTPHRPIHFLHRTGHKIPPSIKANRELEWRVLQELAKIYPITHVVYEVVKARGTQSFSPVMVGQQWQMNRLAERWPLEPRQGWETAQLRLALDLKKTRKKAERSPASHAVDGVALAASHFLHYVPFYEKNGDHGQRWEGTCHVTEAPFAVIQRPLFFRRALHFRNPLSHGRRKRKGGTITPWSIRKGDYVEAMKAGLTVRGYVSGYTQTPTTKALSVADARWHRLGQFAVSSVRLLWRSTRRLLVQAVPSAPC

SEQ ID NO: 1320 - protein, 408 aa, unidentified; identical to SEQ ID NO: 349
  REGION 1..408: note = Ga0315273_10035469

SEQ ID NO: 1321 - protein, 407 aa, Chloroflexi sp.
MPTLKPQGTAKAVRKTSLAKQPGPVTVSGGRLKAAEPSARGRARHAGSASPAPSLCDGQRRGEVYTPSKGGLQQLFVPVIDKEQRPLMPTKPSRARRWVKCGKATPFWKKGVFCVRLNVEPSARNLQPIAIGIDPGSKKEGFSVKSKVHTYLNIEADAVTWVKKHIKQRRQMRRARRYRKTPCRKPRQNRSIGGIPPSVRARWGWRLRICKWLCKMFPITDFVVEDIKAKTKKGQQSWNCRFSPLEAGKNWFYAELERLGRVILKQGYETKRLRDELKLAKDHWVDAWVLATFAVGGDKPDNDKVLCIVPLRFHRRQLHVLQLAKGGIRKRYGGTVSLGFKRGSFVKHPKWGLCYVGGTRANRISLHSLFTGKRITQCARPDDLRFLAYSSWRFYGKEVSKAHSSVA

SEQ ID NO: 1322 - protein, 372 aa, Scytonema sp.; identical to SEQ ID NO: 662

SEQ ID NO: 1323 - protein, 378 aa, unidentified; identical to SEQ ID NO: 390
  REGION 1..378: note = Cyanobacteria bacterium sp.

SEQ ID NO: 1324 - protein, 365 aa, Microcystis sp.; identical to SEQ ID NO: 1126

SEQ ID NO: 1325 - protein, 433 aa, Coleofasciculus sp.; identical to SEQ ID NO: 358

SEQ ID NO: 1326 - protein, 389 aa, unidentified; identical to SEQ ID NO: 933
  REGION 1..389: note = uncultured cyanobacterium

SEQ ID NO: 1327 - protein, 356 aa, unidentified
  REGION 1..356: note = Oscillatoriales cyanobacterium
MRIPVVDQDHKPLMPTTTARARKWLESGKAVKRWSDAGQFYVQLTCEPSSRNTQDIVIGIDPGKLYSGIGVQSAKFTLYTAHLVLPFKTVKGRMESRRIMRRARRGRRINRKVEFSKRAHRQKRFNNRCGHKLPPSIRANRQLELRIVTELCQIYPVTKIKFEYVMARGDKGFSPVMVGQKWMLIQLATLAPVSTIYGYQTASTRNHLGLEKHKANKSKQCFETHAVDGVAIAVSHFVQFKRYHRLGEDGADWSGEVAVTKAPFYVVKRPPYSRRQLHLMVPAKGGNRRKYGGSTTRHGLRKGDLVDSPKGIGYVSGETKTQVSVSDSNWKRLGQIDRKKVSLIRRSNGLILSHGS

SEQ ID NO: 1328 - protein, 393 aa, Hydrococcus sp.; identical to SEQ ID NO: 1167

SEQ ID NO: 1329 - protein, 364 aa, Brasilonema sp.; identical to SEQ ID NO: 834

SEQ ID NO: 1330 - protein, 402 aa, unidentified
  REGION 1..402: note = Ga0315284_10131710
VVKVLKKAVRRQLSRLPVAGQSTKRMLPKSASSALASLDGGNCSSGNGGSRGGNASIYVPVVSSVGTPLMPCHPARARELVRKGRAIRRFNKGIFYIRLLDRIVGEVQSVACGIDPGSKKEGLTVKSAAHTFLNINADAVTWVKNAIETRRNMRRTRRNRNTPCRQPRFNRARGCLPPSTKARWDWKRRLAAWLAKLYPISQFVVEDIKAKTKGQRRWDSNFSPLEVGKKWFYDELAKIAPVELKQGWETKQLRDGLGLKKTSNKMSETFDAHCVDSWALANWWTGGHLAPDNTRLMCMTPLRFHRRQLHVLQPAQNGARKLYGSTRSLGFKRGATVKHSKYGVVFIGGTASDRISLHSLTDGRRLTHNAKPSDCKLLAHSSWRTVLPPRTPSRSFRTGEGL

SEQ ID NO: 1331 - protein, 358 aa, Moorea sp.
MLRVPVISPDGRPLMPTKASRARRWINKGLAVVYQNDLNVFAVQLVNKPSGEETQDIAVGVDPGKLFSGIAVQSNKTTLWTGHLVLPYKKVRDRMDTRRMMRRTRRSRRINRKVCYSQRSHRQKRFSNRREKKVPPSIRANRQLEQRVIKELSLLYPLRVIVYEVVKARGSKGFSPVMVGQYWSISQLERIAPVIQKQGWETALKREALGLVKDKADKSRLSVNTHAVDGIALAATHFFRRKNYYHSNGKLSVPRNCDVTDATFYVIKRAPISRRQLHLLQFYKGGKRRKYGGTTTSHGFRKGDYVEAVKAGKQARGWVSGETARQVSVSDINWKRIGQFTARKVRLLKRSTGLIVNH

SEQ ID NO: 1332 - protein, 329 aa, Moorea sp.; identical to SEQ ID NO: 57

SEQ ID NO: 1333 - protein, 366 aa, unidentified
  REGION 1..366: note = activated sludge metagenome
MRVPVLDTHRNTLMPTTPKRARLLLKQGKARPYWNKLGIFCIILTYDVEPDNQPLAVGIDPGSSFEGWSVVGTKETVLNGMSEAPNHVKKAVETRRTMRRARRHRKCWRRPARFNNRLQGRTFIPPSTFSRWNAKIRILEQLRKILPITDVVVEDVAAVSKKNCRKWNRNFSPLEVGKRWFYASIRELGLNLSLHTGYETKELRDRFDLKKSGQKDKKTFSSHAVDAWVMAAEISGAKRPTETGLYYWTPIRVYRRQLHRFQPEKGGIRKPYGGTRSMGLTRGTLVRHIKYGLTYIGGTLKNRVSLHGFGTGKRVTQHARIEDCTILTRIAWRTQWYAGTGRRHSSPHLLAGVSCLYEDENDVFGA

SEQ ID NO: 1334 - protein, 344 aa, uncultured Microcoleus sp.
MFVPVVGSNNRPLMPTTPARARRWIESGKATPFFKKGVFCVRLNAKPLSHNYQPIAVGIDPGSKREGFTVKSRTHTYLNIQTHAIDWVKDRVEVRRNMRRGRRFRNTPCRQNRTNRSVNKNRIPPSTKARWQWKLRIAKWLTLMFPISTFVVEDVKAKTWKGAKKWNTSFSPLEVGKRWFYSEIEKIAHLEIRQGFDTCKMRQDLGLLKSKKKLSNLFEAHCVDSWVLANWYIGGHIQPDNTKLIEVIPLEFHRRQLHRLQHSTGHVRSRYGGTLSAEFKRGSIVKHPKYGFCYVGGWQESPTKKDPQRKTISLHDLKTSKRLCQNAAPTDCKFLSYNSWRSAN

SEQ ID NO: 1335 - protein, 391 aa, unidentified
  REGION 1..391: note = Ga0307928_10010650
MRTELQELWNAPLVPNTSAELLNATISHESDQEDAKSKFCFPVGSGYNSKEAECPHNVFVLDVDGKPLTPTTSSKARKLMKGKQAKPVWNKFSQFGIQMSVRTRTEIPLVVLGQDWGTKFEGYSIIIGKENNLNVMLKLPDKKKLVRKLEERRRLRRARRQRNCRRRECRFDNRQKDGFIAPSQLQIVNSRLKCMNEFFKCYPIQKVVVEDIKFNHRDKRWGKNFTTMELGKKRIFDTIREKVGVSNLIMFTGMDTQEFRKKHKLKKVKDKSSKNFYTHCVDSFVIANELSQAVPNKSLIYVDDNYRAIRRRLHDSQPAKGGIRAKFSSGNFKGIRKGTICEFGQIVGGTKEQIWYQDFEMRGKRKVYQKGKMLKKISWLSHKYKSEVIAR

SEQ ID NO: 1336 - protein, 349 aa, Scytonema sp.; identical to SEQ ID NO: 1119

SEQ ID NO: 1337 - protein, 364 aa, Planktothrix sp.; identical to SEQ ID NO: 41

SEQ ID NO: 1338 - protein, 399 aa, Synechococcus sp.; identical to SEQ ID NO: 202

SEQ ID NO: 1339 - protein, 349 aa, unidentified; identical to SEQ ID NO: 1028
  REGION 1..349: note = Ga0315285_10061643

SEQ ID NO: 1340 - protein, 421 aa, unidentified; identical to SEQ ID NO: 311
  REGION 1..421: note = Ga0373625_0099120

SEQ ID NO: 1341 - protein, 356 aa, Coleofasciculaceae sp.
MRIPVVDQDHKPLMPTTTARARKWLESGKAVKRWSDAGQFYVQLTCEPSSRNIQDIVIGIDPGKLYSGIGVQSAKFTLYTAHLVLPFKTVKDRMESRRIMRRARRGRRINRKVEFSKRAHRQKRFENRRGHKLPPSIRANRQLELRIVTELCQIYPVTKIKFEYVMARGDKGFSPVMVGQKWMLIQLATLAPVSTIYGYQTASTRNHLGLEKHKANKSKQCFETHAVDGVAIAVSHFVQFKRYHRLGEDGADWSGEVAVTKAPFYVVKRPPYSRRQLHLMVSAKGGNRRKYGGSTTRHGLRKGDLVDSPKGIGYVSGETKTQVSVSDSNWKRLGQIDRKKVSLIRRSNGLVLSHGS

SEQ ID NO: 1342 - protein, 381 aa, Crocosphaera sp.; identical to SEQ ID NO: 454

SEQ ID NO: 1343 - protein, 397 aa, unidentified
  REGION 1..397: note = Ga0315285_10001508
MQELKQLQDTPQVLDNWEESFNSMSDNAKQRSKHLHYGGCGCNRKGRLSTHSVFVIHKDGTPITPTKPQRAKKLLESGVAKSVWNKFGQFGIQMLVDTRKETPSTALGIDNGTKFEGYSVVCGTENQLNVMWKLPDKKKIVKKLEERKNLRRARRHRNCRRRPARFDNREKDGFIAPSQLVMVNSRLKAIKEFFRCYPISLSGIEDVRFNHAKFRHGKNFSTVEIGKTKIYGFLESRAKLYKFAGYQSQKLRKMYGYTKTRVNKASEKFSSHCSDSLTMAIALTTNQHIHRGKFIVADDSYRPVRRRLHDTQFSKGHIRYPYSQGNFKSIRKGSVCNFGLVVGGSKAYAKIDNWLHKRTTKSVKKIGWLSKRFFIIEERAKFPNHTSMVVPFGSLGS

SEQ ID NO: 1344 - protein, 395 aa, Microcoleus sp.; identical to SEQ ID NO: 754

SEQ ID NO: 1345 - protein, 344 aa, unidentified; identical to SEQ ID NO: 575
  REGION 1..344: note = Oscillatoriales cyanobacterium

SEQ ID NO: 1346 - protein, 367 aa, unidentified
  REGION 1..367: note = Cyanobacteria bacterium sp.
MRVPVQNRDHTPAMPTKASRARRWVKEGKATAHWSDNGIYFVRLVAEPSDRKTQPVAVGIDPGKLYTGVAVQSANFTLWMADLVLPFKTVKERMEQRAMMRRGRRGRRINRKLPDNKRAHRQVRFDNRRHFQVPPSIRANRELELRVFKELLAIIPITAVVYEVVKARGDKGFSPVMVGQQWQLNNLKQYVADVQFIEGWKTAFIRRELGLQKQKYSKGDAIPATHALDGVALACNAFISYGIISARSIGWRGNVTVTPAPFAVIRRSPVSRRQLHLMIPSSGGVRRKYGGTVTRHGLRKGDYVEATQGAKTVCGWVSGDTEKQVSVSDPNWKRLGQFSKNKVRLIRRSTGLIVTASYTAVSFSSVV

SEQ ID NO: 1347 - protein, 379 aa, Pseudanabaena sp.
MQRVPVLNPDGSPAMPTKASRARRWLKEGKAKVLHNDLGIFQIQLIAEPSGHNYQDVVIGIDSGKLFTGIAVQTAKSTLLMLHLVLPFKIVTDRMTTRRMMRRTRRARRVIRTICFKLRNHRQKRFSNRRQKGLPPSINANKLLEQRVITELRKIYPVSHFVYEIVKANGTKSFSPVMVGQLQQIAWLKSQLPTEVLEGWKTSILRRELGLLKNKTDKSAQEPATHAVDGVALAASHFIQYKIDRINRSANWIGDVKLNNSPFVVISRPPYSRRQLHLLQFSKGGERRAYGGSTTINNFRKGDLILYKSKDKNIVGYCSGSTGKSLSISDANWSRLGRFAASKCQILSRSCGLVVKAQTLTAIPLATIPKVSGSNLAEA

SEQ ID NO: 1348 - protein, 342 aa, unidentified
  REGION 1..342: note = Candidatus Poribacteria bacterium
MNFVPVKSKDGEKLMPTTSTRAGMMIKCGDATPYWNNGVFCIRLNREASGRYKQEIVVGVDPGSKKEGFTVKSEAHTYLNIQADAHNTVGKKVEKRRELRRGRRSRKRPNRKNRTNRLANRERIPAGTRARWDWKLRILDWLSKLYPIRYVCVEDIKARTIQRAKKWNQSFSPLEVGKQWFYSEVWKRWELFTVEGWETKEIRDRLGLKKSSKKLSETFEAHCVDSWCLAYHTVGGQSVPDNTDIFCVAPIPIRRRELHRQNPQKGGKRPRYGGIVCLGISKNTLVKHVQQGLLRVTGFDKEGLNLSELGSAKRVVRNAKQGTYRVLRKLNFRYKDGNSVSC

SEQ ID NO: 1349 - protein, 341 aa, Ktedonobacter sp.; identical to SEQ ID NO: 632

SEQ ID NO: 1350 - protein, 390 aa, unidentified
  REGION 1..390: note = Ga0373628_0143129
ISGEPLNPTTDRKASLSLPCNDEGHETRTGEPVIGRIPVVSADGTPLMPCRAAKARKLLERGLAEKHWNKLGQFYLQLKFQPKSELNVNQQVCLAVDPGSKWDGIAIISRKGVLTCGMLVLPSKVAEKLTQRRQMRRARRYRKTPRRAKRFDNRYQRDGWIAPSQKAKVDFRTKIVDELCCLYPVSQFAVEDVRFNHYKKRWGKHFSTVEIGKAEFYKHLRTLGELTLYMGTETAELRERFDLPKNPVKKELAWTTHAVDAIAISCAEIGCAHPHPPEFWVWKRLEYARRQLHRLEPDKGGFRRRYGGSWSTPPFRKGDVVLWHGRLARVGGFMDGYGISLHSFGLKNKRFTQDANPNECTRLFNQHVFSRREQPQFLPPINGVGFLGGS

SEQ ID NO: 1351 - protein, 425 aa, unidentified
  REGION 1..425: note = Ga0307928_10017022
METKINYEKGTEKTPTDASLICCSVREPINSTSLENKRNTLDNSKFFFLCGSEYNFPNRKAVCSRVFVLGVDGKPLTPCKHKRARLLMKQNKAKPVWNKFGEFGIKMLEETGSETAEIILGIDNGTKFEGYSIIVDKTNNFNVMWKLPDKQKLVKKLEERSRLRRARRQRNCRRREARFNNRSKDGFIAPSQLQVVQSRLKAITELFKSYPISKVAFEDVKFNHRDNRWGKNFSTIEVGKNMIKDFINNKIGRKNLINFEGIETYNLRNKYNLKKSSDKSKQSFYSHCVDSFIISMETIGKPIILNESITYIDDNYRPVRRRLHDTQFSKGGIRSKFSTGKFQGISKGCIIGDENGWLGQLVGGTKDNCWYCDFEMRGNRKVYQKGKSINKISWISHHFKYNKLNINSQFIPHLKEGDFLAQTIC

SEQ ID NO: 1352 - protein, 365 aa, Scytonema sp.; identical to SEQ ID NO: 653

SEQ ID NO: 1353 - protein, 358 aa, unidentified; identical to SEQ ID NO: 567
  REGION 1..358: note = coral metagenome

SEQ ID NO: 1354 - protein, 240 aa, cyanobacterium sp.
MGCIHFGLIAMYVPVVDRNQRPLMPTTPARAQRWIESGKATPFWKRGVFCVRLNVEPSNRNIQPIAVGIDPGSKREGFSVKSQAHTYLNILAHAVDWVKDAVETRRNMRRARRFRKTPYRQNRANRLVNTQRLPLSTKARWQWKLRICQWLSKMFPITAFVVEDIKARTWKNSRKWNVSFSPLEVGKTWFYNQLRQLGILETKSGMETKELRDSLGLSKTKNKLAEKFSAHNVDSWVLAN

SEQ ID NO: 1355 - protein, 397 aa, unidentified
  REGION 1..397: note = Ga0373626_0068106
MQELKELQDTPQVLNTSGESLNPMSASSKLLHHGGCGCNRKGSMSAHSVFVLHKDGTPLTPTKPSKARKLMSGKAAKPVWNKFGQFGIQLLVDTRRNTPNTALGIDNGTSFEGYSVVCGNENSFNAMWKLPAKKKIVKKLEERRQMRRARRFRNCRRRACRFDNRNKDGFIAPSQLVIVNSRLKAIREFFRTYPINLVGMEDVRFNHARFRNGKNFSTVEIGKAMIYEFLESRAKLYKFAGYQTQKLRKAYGYVKTRANKASEKFVSHCSDSLALAVSLTTNQHLHRGKFIIVDDSYRPVRRKLHDARFSKGGIRHKYSTGNFHGYRKGTISDFGLVGGGTGKSFYVYDWDWKRKKKSVDKVTWMSKKFMLNIPNSSILQAGWSPSALGVTYETRCL

SEQ ID NO: 1356 - protein, 398 aa, Symploca sp.
LGRSKKGHLGADGGKEQVTFKRFGLSLMQRVPVISPQGKALMPTKPSRARKWLKKGKARIYKNALNVFAIQLIDEPSGEEAQDVVIGIDPGKMFSGVGVQSSKATLLKLHLILPFPNVTKKMTRRRILRRARRGRRINRKLPYSQRCHKAKRFDNRVQKKLPPSIKANRQMELRVVKEIVRLFPVSNMVYEYIKARGDKGFSPAMVGQKVMLKWLERIAPTATQFGWQTSNLRQWLKLPKDKADKSLAVEETHSNDGVALAASHFIKWKKWHSTKAHGGYWEGEICLTSAWFLVIAKPNIYRRQLHFENPDSKKPNPTQCRKRKGGTVSPFGFRSGDFVQAEKAGQIYRGWIGGYTQTAKSKNVSIYDINWKRIGQFSPNKVRLLKRSTKLLVSGATS

SEQ ID NO: 1357 - protein, 354 aa, unidentified
  REGION 1..354: note = Candidatus Poribacteria bacterium
MGQYTPERDLQTMFVPVVDKNQKPLMPTKPSRARRWIRERHATPFRKNGIFCVRLNVDPSERYFQEIAVGVDPGSQKEGFTVKSAAHTYLNVQADAHSKVGKKVEKRRELRRGRRSRQCPNRPNRTNRLANRERIPAGTRGRWEWKLRILAWFSKMYPLTHICVEDIKARTIARAKKWNTSFSPLEVGKHWFYTEIRKRWELLTLRGWETKGLRDRLGLRKSSKKLAETFDAHCVDSWCLAYQTIGGDSLPDNRNIFCISPIPIRTRELHRQTAQKEGRRLRYGGTVLASGLTKSTLVRHSQYGLTRLAGISAKGLFSLYDLMGKRLTTGAKRSDSRILTRLNFNYRSGHSSQS

SEQ ID NO: 1358 - protein, 332 aa, unidentified; identical to SEQ ID NO: 1133
  REGION 1..332: note = Ga0315284_10173532

SEQ ID NO: 1359 - protein, 398 aa, unidentified
  REGION 1..398: note = Ga0315279_10038201
MELQERQDASLVLPSSEESLNSMFPQGELSSVHIVEGKFNPTDRVGAEPNRFRTPIVDAEDKPLMPCTSVRARLLLKTGKAFAKRNKLGIFYLQLNHTVDATNQPLTLGVDSGSKFEAFSVVGTKDTILNIMSEATTWVKKTIEQRRNMRRSRRYRKTRYRQCRFNNRLTNRTHIPPSTKARWDTKLRIINQLEKILPIQSIIAEDIKAVTHKNARSWNTSFSPLEVGKQYFYSLINRRLIVKSGIETKTLRDSYCLKKLRNKSKPVFESHCVDAWVLAASISGTKQPSTRTLYYMVPLRFHRRQLHDLQPRKDGKRRPYGGTFSLGLKRGTFVKHVRYGFCFVGGFLNGKLSLHSVKNGERLTQNSKKEDCKVLTRIAFRTQFLSCIKTGVSFGDSK

SEQ ID NO: 1360 - protein, 329 aa, Moorea sp.; identical to SEQ ID NO: 57

SEQ ID NO: 1361 - protein, 380 aa, Halothece sp.
VGEEAKNFQSERIISMYRVPVRSKNGKPLMPTKASRARRWLKEGKAVIYKNDLHFFTVQLTIESGEEIQPVAVGIDPGKHYSGIGVQSSKATLFTAHLELPFQRVKNHMETRAMMRRGRRGRRINRKLPFDQRSHRQKRFNNRRCHKLPPSIKANRQLEYRVVKELSQLFPISSIIYEIVKAKGDQGFSPVMVGQKVMTEQWLPSIALVTTLFGWETSARRELLGLEKDRNKSNQTPATHAVDGVAIASHEFLKYKYLKGDKGWFEGSVEITNAPFSVIKRPPVSRRQLQLMIPTTGGVRRKYGGTTTRHGFRKGDYVETERKGIKYQGWVSGDTKTQVSVSDFDWKRLGQFSAKKTQLLKRNTNLIVNTLNGGRAFLSQ

SEQ ID NO: 1362 - protein, 300 aa, Planktothrix sp.; identical to SEQ ID NO: 122

SEQ ID NO: 1363 - protein, 325 aa, unidentified
  REGION 1..325: note = sediment metagenome
MPCTPPKARMLLKEGKARPRRNKLGIFYLQLTYTQEPDKQLLVVGIDPGSSFEGYSVVGTQDTVLNLMVEAPTHVKDAVETRRTMRRARRFRIWRRPCRSKNRLTRTKRIPPSTRSRWHAKARVVKHLTSIIPLSCVVVEDVQATTKKGKKWNMAFSPVQVGKMHLHHLLSEMGLEVQTREGWQTKELREHYGLSKTKNKAKQAFDSHAVDAWVLAATVSGAEKPTCTRLWYVVPARLHRRQLHALQPSKGGVRRPYGGTRSLGLKRGTLVKHPKYGLCAVGGCNRKNMTISLHDYRTNKRLTQRAKVEACHVLTWVAFRSWLVA

SEQ ID NO: 1364 - protein, 354 aa, unidentified
  REGION 1..354: note = Ga0255812_10495892
MQIPVLDSRKRPLMPTSPARARLLLKKGKAKPYWNKLGIFCIILQKEVEPDNQQIAVGIDPGSKWEGWSVVGTQDTILNGMSEAPTHIKDAMEVRRNMRRARRHRKLWRREARFDNRLRNKNTLPPSTLARWNAKLRILKHLVKVLPITDVVVEDVRAATKRGCKRWNTCFSPIEQGKQWLYSHVRDLGLKLHLRQGYETKELRDKFGLKKTSQKDTKTFSSHAVDAWVMAASITGALKPTWLGLIYWVPIRLHRRQLHAFQPGKGGTRRPYGGTRSMGLSRGTLVKHIKYGLTYIGGTLKGRVSLHSLRTGKRVTQGAKITDCRVLTGLSWRGTLLPRLKSWVSATPAPQRSS

SEQ ID NO: 1365 - protein, 352 aa, unidentified; identical to SEQ ID NO: 1063
  REGION 1..352: note = Candidatus Poribacteria bacterium

SEQ ID NO: 1366 - protein, 346 aa, Methanocalculus sp.
MRIPVLDTNKTPLMPTTPTRARLLLKQGKARPYWNKLGIFCIILTYQVNPDNQPLVIGIDPGSSFEGWSIVGTQETVLNGMSETPKHVEKAVETRRTMRRSRRYRHCWRRPARFRNRLKNRSSIPPSTRARWNAKLRILTQLQKIIPITNVVVEDVAAVTKKNCKRWNSNFSPLEVGKKWFYRTIRSLNLDLHLRTGYETKDLRDRFNLRKTSQKNKPVFFSHAVDAWVIAADVSGAKQPTEHGLFYWTPIRFYRRQLHRLQPETGGIRKPYGGTISLNLIRGTLVNHFKHGLSYIGGTLKERISLHHFRTGKRLTQSAKPTDCTILTRIAWRTTHYADTRQSAFL

SEQ ID NO: 1367 - protein, 329 aa, Planktothrix sp.
QVQLIEYPKGERTQPIAVGIDPGKLYTGIGVQSAKFTLWLPHLQLPFKTVRERMEQRRMMRRGRRGRRINRKISFDKRAHRQQRFDNRRQRKVPPSIRANRELELRVIGELSSIYPLTDVVYEIVKAVGDKGFSPVMVGQKWQLKNLEKYGEVKQYEGWQTANTRCFLGLEKQKHSKGDAIPATHAVDGTALACQAFIRYGIVDRQTMGWIGEVRITPAPFTVIRRPPICRRQLHLMVSSKGCIRRKYGGSVTRHGFRKGDLVMATQGSKTHQGWVSGDTEKQVSVSDRNWKRLGQFSKNKVRLVQRSTGLIVLPNRRLSNLMASNHQI

SEQ ID NO: 1368 - protein, 343 aa, unidentified
  REGION 1..343: note = Cyanobacteria bacterium sp.
MFVPVVDQNNRPLMPTTCSRARRWIKSGKATGFFKKGVFCVRLNQESSSRNTQPIAVGVDPGSKREGFTVKSKTHTYLNVQTYAVDWVKDHVEVRRNMRRARRFRNTPCRQNRRNENANKQKLPPSTKARWQWKLRICKWLASMFPVTIFIVEDVKAKTWKGAKKWNVMFSPLEVGKKWFYLELEKIAHLQTRTGNETYEMRQSLGLKKSKNKLSSKFDAHCVDSWVLANWYVGGHIVPDNTLLIEVVPLEFHRRQLHRLQHQAGHIRPRYGGTISAGFKRGSVVKHPKYGFCYVGGWQESPTKKDPLRKTISLHNSKTGQRLTQNALAKECKFLAYNSWRIA

SEQ ID NO: 1369 - protein, 369 aa, unidentified; identical to SEQ ID NO: 1194
  REGION 1..369: note = Oscillatoriales cyanobacterium

SEQ ID NO: 1370 - protein, 346 aa, Leptolyngbya sp.; identical to SEQ ID NO: 238

SEQ ID NO: 1371 - protein, 342 aa, unidentified; identical to SEQ ID NO: 16
  REGION 1..342: note = Candidatus Poribacteria bacterium

SEQ ID NO: 1372 - protein, 333 aa, unidentified
  REGION 1..333: note = metagenome
MVPVLDKNRVPLMPCSEKRAKKLMDRGDARPFWCKGVFCIILQREPKSRYMQDIAVAIDPGSKFNGYTIKSQAHTLLNVQADAISDVKKKMEERTMMRRARRGRKTPYRKCRFNRSVKERLAPSTKARWQQHLNMVKWFSKMYNIKHVVVEDIKAKTLKGAKKWNKSFSPLQVGKKWFYNTVESLGYVLHKFKGHQTAFIRNSLGLKKNNKKDKKCFYTHCVDTFCLATQIIGGNGVADNLFVKFIKPLRYYKRKLHEILPKKNGVRRNYGSTLSLGINRGTLIEHIRHGICLIGGTSKGRLSLHDLATNKRLCQNAKKEDIKILTQMRWNIY

SEQ ID NO: 1373 - protein, 364 aa, Anabaena sp.; identical to SEQ ID NO: 245

SEQ ID NO: 1374 - protein, 366 aa, Moorea sp.; identical to SEQ ID NO: 52

SEQ ID NO: 1375 - protein, 379 aa, Crocosphaera sp.; identical to SEQ ID NO: 764

SEQ ID NO: 1376 - protein, 401 aa, unidentified; identical to SEQ ID NO: 801
  REGION 1..401: note = Ga0373628_0000972

SEQ ID NO: 1377 - protein, 348 aa, unidentified
  REGION 1..348: note = fermentation metagenome
MRVPVMDTHRTPLMPTTPTRARLLLKQGKAKPYWNKLGIFCIILTYTVEPDNRSLVVGIDPGSSFEGWSVVGTKETVLNGMSEAPKHVKKAVEVRRTMRRARRHRKCWRRPARFNNRSRNKEALPPSTFARWNAKIRILEQLRKVLPITDVVVEDVAAGTKKNCTRWNTNFSPLEVGKQWFYRTIRDRGLDLHLHAGYETKELRERFGLKKTRQKSKQVFAAHAVDAWVMAADVSGAEHPTERGLYYWAPIRFFRRQLHRLQPEKGGNRKPYGGTRSLGFSRGTLVRHIKHGLTYLGGTLKGRVSLHSAVTGKRVTQNAKVEDCTILTRIAWRTQLYAGTGRRHSSPA

SEQ ID NO: 1378 - protein, 351 aa, unidentified; identical to SEQ ID NO: 180
  REGION 1..351: note = Oscillatoriales cyanobacterium

SEQ ID NO: 1379 - protein, 410 aa, unidentified
  REGION 1..410: note = Ga0315284_10133469
MLSRKQQVKRETRVPKIGCRKANGRLKETELGGRGSPKDMQDASQVLLPSVSQSRWDSTSLSSVRNKMMNGGGNSANLRVPVIGKTGKTLMPCLPVRARELIEKGKAIGRWKVGIFYLQLLDREDGVTQPIAVGIDPGSKREAFTVKSSKTTYLNILSDAVTWVKDAVETKRNMRRARRFCNTPCRQNRENRSRGGIPSSTKARWQAKLRIVDILDSLYPIETWVVEDIKAKTRKNCKKWNISFSPLEIGKKWFYDELRKKGELVLRSGWDTKCMRDELGLVKTNGKMEEKFSVHNVDSWVLANSVVGGHTKPDNESVWRMIPLRFHRRQLHRLQPSGGIRATYGGTISCGLKRGSLVRHPKWGLCYVGGSMEGMGISLHGFEDGKRICQNAKIRDLKVLRFGKWRYRAA

SEQ ID NO: 1380 - protein, 356 aa, unidentified
  REGION 1..356: note = Ga0373630_0081576
MVWISIVSASGKPLMPCRPSKARKLLTKGLAEKHWNKLGQFYLRLKFELKSELNKSQQVCLAVDTGSKWDGMAVLSKKCVLTTGMLVLPSKVAEKLEQRRQMRRARRYRKTPRRAKRFDNRRRPEGWIAPSQKARVDFRTKVVDELCKLYPVSRFVVEDVKFDHYKKRWGKHFSTVEIGKAKFYEHLRKLGELTLYTGVQTAEWRDKLGLPKNPVKRELSWDTHAVDAIAIGCAEVGCENPYPPEFWVWKRFEYARRQLHRLEPGKGGIRRRYGGSWSVPPFRKGDVVQNHGRLVRVGGFMDGRISLHSFDLKNKRTTQTAKPEDCTQLFNQQVFNKFEMPQFLPPINGVGFLGGF

SEQ ID NO: 1381 - protein, 363 aa, Leptolyngbya sp.
MNRNTRIPTLAPDGTRLMPTKYWRAEAMVEKEEAEWVSNDLNIKAIRLLREPSGYAVQPVTLGVDPGKKFSGIAVQSSQFTLFTAHLVLPFPNVTKKMTGRRILRRTRRGRRINRKVAFKLRAHRQERFYNRRQKKLVPSIRANREFELRIARELMQLFPISSIVYEYIEAKGSKAFSPVMVGQKVMLEWLRQLTPVKTQFGWQTATLRNHLGLVKQKHDKSEQSPQTHAVDGVALASSQFVHYKAFQSGREHGHCWTGSVRLTPSPFRVITRPNIYRRQLHFENFSKGGIRKRKGGTVTPWGLRSGDFVQAEKAGRVYRGWIGGFSQVNNVVSVYDHNWKRIEQFRVSKVQLIKRSTKLCVA

SEQ ID NO: 1382 - protein, 365 aa, Microcystis sp.
MPRVPVISKDGKPLMPTKPSRARRWIKEGKAIGKFNDLGIFYVQLTDEPSDNKTQPIAIGIDPGKLFSGIGVQSSLFTLWKAHLELPFKRVKERMDNRRLMRRGRRGRRINRQLSFNLRAHRQKRFSNRKQGKLAPSIRANRQLELRVVSELTKIYPITDIYFEYIKADVDLTSGRKGAKSGKGFSPVMVGQKWAIEQLSQLATVHTRFGWQTSNLRKYLRLEKSKNKAEQSPESHANDGIALACFQFLDYWPFHNSNGHGYDWKGYVKVTNAPFAVIKRPPISRRQLHLMVFSKGGKRRKYGGSTTRHGFRKGDLVSSPKGIGYVSGDTEKQLSVSDTSWTRLGQIAVSKIQLIRRSNGLIVSH

SEQ ID NO: 1383 - protein, 372 aa, unidentified
  REGION 1..372: note = Ga0373625_0195404
MRLKTTKAVGRGSLSDVRNVPLVPFQSSAESRSGNREGFLVPVVDSNNNPQFPCKCTVAASLIRIGKATPFFKKGIFAIRLNKEVKDTHVERIVMSIDPGSKRTGITVATEENVILNIQCNAPDWVKGKVETRKNYRRSRRARNTPYRKCRFNREIGCLPPSIKAKWGAHLRILDQLRKIIPITDIVIEDIKAKTRKGSKKWNTSFSPLEVGKTYFESEIQKRELKLYKFQGFETKEHRDYRGFKKSSNKLEKKWETHCVDSHCLSEMFFGDLEPVKKMYLLNFLKFNRRELHQSYHNGIRRLYGSTRSEGINRGTLVNHSKYRLSYVGGTHKGVISLHNVETGKRLSQNVKKSDLTILTKQSWRISNSSRG

SEQ ID NO: 1384 - protein, 378 aa, Symploca sp.
LQRVPVISPQGKALMPTKPSRARKWLRDGKATIYKNDLNIFAIQLIDKSSGEETQDVVVGIDPGKMFSGVGVQSSKATIIKLHLILPFPNITKKMIGRRILRRGRRGRRINRKLPYSQRCHRAKRFDNRVKKKLPVSIKANRQIELRVVKEACRLFPISHIVYEYIKAPSDKGFSPAMVGQKVMLEWLRKIKPTSTIFGWETSNIRQWLKLPKDKSNKSKAVEETHSNDGVALASSHFIRWKEWQSSSARGGYWDGEVIVTPAPFKVIAKPNIYRRQLHFENPDSKKPNPTQYRKRKGGTVTPFGLRSGDFVQAIKAGQIYRGWIGGYTQTAKTKKVSIYDVNWKRIGQFSPNKVRLLKRSTKLLVSGSYPDQHSSLR

SEQ ID NO: 1385 - protein, 365 aa, Gloeocapsa sp.; identical to SEQ ID NO: 931

SEQ ID NO: 1386 - protein, 344 aa, Microcoleus sp.; identical to SEQ ID NO: 367

SEQ ID NO: 1387 - protein, 335 aa, Planktothrix sp.
LRIISMQRVPVISSNNQPLMPTKSSRARRWIKEGKAIGKFNDLGQFYVQLKVEPLDDKTQPITVGIDPGKLYSGIGVQSANFTLWTGHLELPFKKVRERMDNRRMMRHGRRGRRINRNIPFNQRAHRQVRFSNRRQGKLPPSIRANRQLELRVVKELFKMFPITDIYFEYVKADVDLTSGRKGAKSGKGFSAVMVGQKQMVNWLSQLATVHTIYGWQTSNLRKYLKLEKSKDKSEQTVKSHAVDGITLACYYFLEYKAHFSSNTHGHSWQGNVTITSCPFAVIKRPPISRRQLHLMVPSKGNIRRKYGGTTTEFGLRKGDLVNSPKGIGYVSGQT

SEQ ID NO: 1388 - protein, 358 aa, Moorea sp.
MLRVPVISPDGKPLMPTKASRARRWLKQGLAVVYPNDLNVFAVQLVNQPSGYQTQDIAAGIDPGKLFSGIAVQSSHATLWTGHLVLPYKKVRERMDTRRTMRRTRRGRRINRKVPYYNRSHRQKRFSNRESKKVPPSIRANRQLEQRVVKELSFLYPLKTIVYEVVKARGNKGFSPVMVGQYWAISQLEKIAPVTQKQGWETALKREALGLVKDKTDKSRQTVNTHAIDGIALAATHFFRRKNYYHSKGKLSIPENCNITNALFSFIRRAPISRRQLHLLQFSKGGKRRKYGGTTTSHSFRKGDYVEAVKAGTTYRGWVSGETAKQVSVSDINWKRIGQFTARKVRLLKRSTGLLVNY

SEQ ID NO: 1389 - protein, 344 aa, Tychonema sp.; identical to SEQ ID NO: 734

SEQ ID NO: 1390 - protein, 399 aa, unidentified
  REGION 1..399: note = Candidatus Bathyarchaeota archaeon
MQSRSGEGYKNGLVHTQVNPSSGFGRSDGLTEPKPSAATPMGAKLRKEHEYRVPVVSVDGKPLMPTTPARARKMIEGGVAVGKWSKLGIFYIQMLRPVGEKTQEIVLGLDPGSEYEGVAVVSKEGVLQTGMIILPRGIAKKIERRRMMRRARRGRKWRRPCRFDNRRRPEGWIAPSQKAKVDFRLKIIEELKKLYPIAKAIVEDVRFNHYRKRWGKHFSTVEIGKKRTYDKLKEWFQLKLIEGIETARIRAEYGAKKSSDKREKSVFSHAIDAIVMGANEIGLKILRIPSFFIWRRYQIARRQLHKFQFEAGGIRRREGGSKSMGIFKKGDIVLRRGDLYRVGGYSEGIGISLHSFDTENRRITQRVNPKDCIRLFNQRMIYEPISPSTKVVGGIGGVS

SEQ ID NO: 1391 - protein, 397 aa, unidentified; identical to SEQ ID NO: 733
  REGION 1..397: note = Ga0373625_0005445

SEQ ID NO: 1392 - protein, 352 aa, unidentified
  REGION 1..352: note = Candidatus Poribacteria bacterium
MFVPVVDKNQNTLMPTKPSRARKWIKSGKATPFWKNGIFCVRLNVDASDTELQDIAVGVDPGSKKEGFTVKSKAHTYLNVQTDAHKDIGKKVEKRRELRRSRRSRKCPNRKNKTNRLANKERIPDGTRARWDWKLRILEWLSKLYPVSKVIVEDIKARTKPDKDRWNQSFSPLEVGKKWFVRELINRFGVGNVLKYEGTWTYARRNALGLEKLKDKLSDSFYAHCVDSWVMAHSVVNGDSKKAMSMKPDNTEVFCISPIPIARRNLHREQPKKGGIRSRYGGTILKDGLVKNTLVKHVKYGLTRLAGINAKGLFSIYSLDGKRLTTGAKQSDFKVLTKLNFQYSRSGHSSQA

SEQ ID NO: 1393 - protein, 360 aa, Moorea sp.; identical to SEQ ID NO: 60

SEQ ID NO: 1394 - protein, 341 aa, unidentified
  REGION 1..341: note = Candidatus Poribacteria bacterium
MFVPVKSQSGKKLMPTRPNKAGMLIKKGLATPYWSNGIFCIRLNYDTKEHTQEIVVGIDPGSKKEGFTVKSESHTYLNVQADAHNKGGKKVAKRRELRRGRRSRKCPNRKNRMNRLANKARIPAGTRARWDWKLRILEWLSKVYPVTRVCVEDIKARTIKRAKKWNTSFSPLEVGKQWFYSEIEKRWELITLQGWETQEIRDRLGLKKSSKKLSETFEAHCVDSWCLAYHTVGGSDIPDNINLMCISPIPIKRRELHRQQASKGGQRSPVGGTVFGQGLIKNTLIRHVKYGLTRLAGINAKGLFSIYSMENKRLTTGAKRSDFRVLTRLNFYYRSGHSSQS

SEQ ID NO: 1395 - protein, 358 aa, Moorea sp.; identical to SEQ ID NO: 62

SEQ ID NO: 1396 - protein, 337 aa, Microcystis sp.; identical to SEQ ID NO: 364

SEQ ID NO: 1397 - protein, 337 aa, Arthrospira sp.; identical to SEQ ID NO: 85

SEQ ID NO: 1398 - protein, 417 aa, unidentified
  REGION 1..417: note = Candidatus Bathyarchaeota archaeon
MVASTQGLTSLSPFRATSAELQERLDASLVQPSSEEPLNSTPLKAKLGRHWRREIHPAGEQARANSPVQQRRVPVVDSRGIPQMPCTAVRARLLIKRGKARPKWSKLSVFYVQLCYSVEPKNQLIAVGQDPGSEFEGLSVVGTKYTVLNVMSETVDWVKDVVKQRRQMRRARRYRKTRRRAKRFDNRRRPNGWIPPSTKARWDVKLRIVRHLAKVTPISHVVLEEDKAITKREKRKWNENFSPIQNGGNHYLSEARKTCADVSTIEAHTLPRLREKYGLSKSGDKAERSFHSHYVDAWCMAASITGAENPTDTSIHYTIPLRFHRRQLHRLEPGKGGTRKRYGGTISLGLKKGTLVKHVKHSLCYVGGNLRNRLSLHNPKTGRRITQNAKRSDFKILTRIAFRTQLLPRLKSVGFLG

SEQ ID NO: 1399 - protein, 392 aa, Okeania sp.
MIRVPVQNPDGSPVMPTKASRARRWVKQGKATEHWNDAGLYYVRLVAEPSFACETQKITVGCDPGKNYTGIAVQSAKFTLYTAHLVLPFERVKERLGSTVIKQGKVIKNVRGRALQRRIRRGRRINRKVPFNQRAHRQKRFDNRRQKGKLAPSIRASRQMEIRIITELSKVFPITTIVYELVKADVDLTSGRKKARSGKGFSPVMIGQSWCVEKLKSIASVKTVYGWQKNHNGTSQIRKHLGLEKIKDKRAQVPESHAVDGIALAASEFVRHGVTPKKNYDIYSWKGSVNITPSIFRVITRPAYFRRALHFDNAEKGGIRKRKGGTITPFKLRYGDKVIAEKAGKTYSGWIGGFTDAQTKNISVYDHNWKRIGQFSPKKVQLIRRSNKLCVV

SEQ ID NO: 1400 - protein, 372 aa, unidentified; identical to SEQ ID NO: 1383
  REGION 1..372: note = Ga0315295_10030336

SEQ ID NO: 1401 - protein, 341 aa, unidentified
  REGION 1..341: note = Sponge metagenome
MNFVPVKSKDGKRLMPTTPTRAGMMIKCGDATPYWDHGVFCIRLNREPSKRFKQNIVVGVDPGSKKEGFTVKSESHTYLNIQADAHTGVGKKVEKRRRLRRGRRSRKCPNRKNRTNRMANKARMPAGTRARWDWKLRILDWLSKLYPVTHVCVEDIRARTKQSQKKWNTSFSPLEVGKQWFYAEIEKRWKLFTLQGWETKEIRDRLGLKKSSKKLSETFEAHCVDSWCLAYHTIGGVSVPDNTDLMCVSPIVIVRRELHRQNPQKGGKRSRYGGTTQNGLVKNTLVKHIKHGLTRISGFGKRGISLYDLGGTRLCQNAKVSDFKVLRRLNFTYRSGFSSQV

SEQ ID NO: 1402 - protein, 465 aa, unidentified
  REGION 1..465: note = Ga0315296_10008306
VALLSRRRPEREKDSPRSWREHWNDAAASSQSCHDPPINGVGLGMVAPTKSMTRGLRTTKPQQTRRNYKNGRVRAQALPASPEPLNGATGGNAGLSFSSNLDGRSTRATETAIGQRIPVVGQNGKPLMPCKASKARRLLGGGKAVGVWDKLGVYYLRLTFDPKSEPNKGQKVALGLDPGSKFDGYAVTTKVVNLTAMAELPDGIAKKLEVRREMRRARRFRNCRRRPMRFDNRERGGFLAPSQKSKVEFRLRIAKELCKLYPVTDIAVEDVAFNHYRKRWGKQFSTVEIGKQMLYSELRDMANLQTFKGVQTKERRELLGLKKAGSKNARKPESHATDAIALASLAVPVCNAQISEFYVWTRYQNRRRQLHKLEAAPGGIRKREGGSVSIPPFKKNDVALWKGRLARVGGYMHGRMSLHEYTIDNKRFTQNAKPEDCKRLFNQRIMSERQFIPPLKSVGFLGAGW

SEQ ID NO: 1403 - protein, 347 aa, unidentified; identical to SEQ ID NO: 410
  REGION 1..347: note = Cyanobacteria bacterium sp.

SEQ ID NO: 1404 - protein, 372 aa, unidentified
  REGION 1..372: note = Ga0315295_10030299
MRLKATKAVGRGSPSDVRNVPLVPFQSSAESRSGNRKGFLVPVVDSNNNPQFPCKCTVAASLIRVGKATPFFKKGIFAIRLNKVAKDTHAKRIVMSIDPGSKRTGITVATEENVILNIQCNAPDWVKGKVETRREYRRSRRSRNTPYRKCRFNRDIGCIPPSTKARWQAHLRILDQLRKIIPITDIVIEDIKAKTRKGSKKWNTSFSPLEVGKTYFESEIQKRELKLYKFQGFETKEHRDYRGFKKSSNKLEEKWETHCIDSHCLSEMFFGNLEPVKKMYVLNFIRFNRRELHQGYHNGIRRLYGSTRSEGINRGTLVKNTKYGLSYVGGNSKELISLHNVETGKRLSRSVKKSNLIILTKQSWRISNSSPT

SEQ ID NO: 1405 - protein, 379 aa, Crocosphaera sp.; identical to SEQ ID NO: 255

SEQ ID NO: 1406 - protein, 385 aa, Kamptonema sp.
MNRVPVVSQDGKQLMPTQASRARKWVESGRAVGKWSDLGIYYVQLLEEPSGTETQPVAVGLDPGKSYSGVGVQSAKCTLLQLHLILPFGRVRARMDQRRLLRRGRRSRRINRDLPFKWRNHRQKRFDNRRGNKLAPSIRASRQLEIRVVKEIAAIYPVVAIGYEKVRADVDLTSGRKGTRSGKGFSPVMVGQRWAISELEKIAPVYVREGWQKDGNGTSQLRTALGLVKDKQNKSEAKPETHSVDGVALACGYFIQYRSFHQGRNHGHAWFGQVQPTESLFKIITRSGAVKRGKEYGVFRRQLHFEVPSKSGVRRRKGGTVTPWGFRIGDLARSSKGKTESIGYIGGYSEANKVVSLYDWQWKRIGQFSVSKTTLIRRSNGLCVA

SEQ ID NO: 1407 - protein, 365 aa, unidentified
  REGION 1..365: note = freshwater metagenome
MARVPVISKDGNPLMPTKPSRARRWIKEGKAIGKFNDLDIFYVQLIDEPSDSKTQPIAIGIDPGKLFSGIGVQSSLFTLWKAHLELPFKRVKERLDNRRLMRKGRRGRRINRQLPFNLRAHRQKRFSNRRTGKLAPSIRANRQLELRVVSELTKIYPITDIYFEYIKADIDLTSGRKGAKSGKGFSSVMVRHIWAIEQLSQLATVHTRFGWQTSNLRKYLRLEKSKNKAEQSPESHANDGIALACFQFLDYWPFHNSNGHGYDWKGYVKVTNAPFAVIKRPPISRRQLHLMVFSKGGKRRKYGGSTTRHGFRKGDLVSSPKGIGYVSGDTEKQLSVSDTNGQRLGQITVSKIQLIRRSNGLIVSR

SEQ ID NO: 1408 - protein, 358 aa, Moorea sp.
MLRVPVISPDGRPLMPTKASRARRWLNQGLAVIYQNDLNVFAVQLVNQPSEEQTQDIAIGIDPGKMFSGIAVQSNKATLWTGHLVLPYKKVRERMDTRRMMRKTRRSRRIDRRVPYSQRSHRQKRFSNRVNKKVPPSIRANRQLEQRVAKELSLLYPVKAIVYEVVKARGDKGFSPVMVGQYWSISQLEKIAPVTQKQGWETALKREALGLVKDKTDKSRQTVNTHAIDGIALAATHFFRRKNYYHSKGKLSIPENCNITNALFSVIRRAPISRRQLHLLNFRACGKRRKYGGTTTSHGFRKGDYVEAVKAGKITHGWVSGETAKQVSVSDINWKRIGQFTARKVRLLKRSTGLLVNH

SEQ ID NO: 1409 - protein, 243 aa, unidentified
  REGION 1..243: note = Ga0373629_0021606
VEIVMFVPVINKDHKPLMPTTPDRARNWLKKGKATPFWSNGVFCVRLNAEPSDTKKQDIVVGIDPGSKREAFTVKSEAHTYLNVLVDAVTWVKDAIEVRRNTRKNRRYRKTPYRQNRLNRARGGLPPSTRARWQLKLRVVNRLLRVFPVTDFVVEDIKAVSKCGKRKWNVSFSPLEVGKNWFYDELRKLGNLETKRGYETKELRDTLGLKKTSNKMSESFNAHNVDSWYWPTGELVVIQCQIM

SEQ ID NO: 1410 - protein, 367 aa, Scytonema sp.; identical to SEQ ID NO: 14

SEQ ID NO: 1411 - protein, 365 aa, Microcystis sp.; identical to SEQ ID NO: 274

SEQ ID NO: 1412 - protein, 299 aa, unidentified; identical to SEQ ID NO: 445
  REGION 1..299: note = Ga0315280_10050637

SEQ ID NO: 1413 - protein, 341 aa, unidentified; identical to SEQ ID NO: 702
  REGION 1..341: note = Candidatus Poribacteria bacterium

SEQ ID NO: 1414 - protein, 364 aa, unidentified
  REGION 1..364: note = Ga0315280_10000252
METSKTINRVPVVDAKGKPLMPCTPVRARLLLKKGRAVARRDKLGVFYIRLKTVKQPNNQPLVVGVDPGSKFEAVSVVGTKDAVLNAMSETVTWVKKAVKQRRQMRRGRRGRKTRCRACRRNRLGRGLPPSTRARWNAKLRIIEQLQKMLPIQTAMVEDVKAKTRKGQKRWNASFSPLEAGKRHFYGQLERMGLTVVLKQGYETKKLRRRHHLKKLRRKSAKTFESHYVDSWALAASETGAKHPCRSLYYLVPLRWHRRQLHRLQPKDGVRRRYGGTLSLGLKKGTLVRHVQYGLCYVGGNIAGQFSLHSSKTGARLTQNAKRGDFKVLTRVAFRSQFLPALKSGISLGHNITFFNIKKNTTEK

SEQ ID NO: 1415 - protein, 228 aa, Microcoleus sp.; identical to SEQ ID NO: 887

SEQ ID NO: 1416 - protein, 339 aa, unidentified; identical to SEQ ID NO: 598
  REGION 1..339: note = Ga0315284_10166547

SEQ ID NO: 1417 - protein, 404 aa, unidentified
  REGION 1..404: note = Ga0315284_10098300
MENKTTMDGLQERQDAPLILTTSAEPLNATNPQTVRLHGGSMPVRHWGSGCYSQVGARMSGHSVFVVGFDGKPLTPTTNAKARKLLQSKQARPQWNKFGQFGIQMLVATRTETPQSALGVDFGTKFEGYVVVVGRENNQAVMWKLPDKKKIVHKLEERSQLRRAKRWRKCRMRECRFDNREKKGFIAPSQLVMVQSRLKALGEFFKCYPIKVVALEDVRFNHRDNKWGKNFSTIEIGKRVINDWIRERAYLQMYSGYETPDIRGEYGYKKSGQKSAELFNSHCSDALALAVDVTTKQRIPEGKLVVVDDTYRPVRRRLHDTQPSKGGVRQPYSQGNFKGVRKGTVCEHGQIVGGTKNNYWIRNTENKRIGRSHISWLSHKFKTKEVMVAIPPPNKFGGLLATRL

SEQ ID NO: 1418 - protein, 358 aa, Moorea sp.; identical to SEQ ID NO: 394

SEQ ID NO: 1419 - protein, 297 aa, Okeania sp.
MPTKASRARRWVKEGKATGHWNDAGLYYVRLVAEPSGCETQKIAVGCDPGKNYTGIAVQSAKFTFYTAHLVLPFERVKERLGSAFLKQGKVVKNVKGRALQRRLRRGRRINRKVPFNQRPHRQKRFNNRCKKGKLAPSIRASREMEIRIITELSKVFPITTIVYELIKADVDLTSGRKGARSGKGFSPVMVGQNWCVEQLKSIADVKTIYGWQKNKNGTSQIRKYLGLKKIKNQRAAVPESHAVDGIALAASEFIRYGVIPRKNCDTWGWIGSVNITSSIFRVITRPAYFRRALPDR

SEQ ID NO: 1420 - protein, 365 aa, Microcystis sp.; identical to SEQ ID NO: 336

SEQ ID NO: 1421 - protein, 337 aa, Limnospira sp.; identical to SEQ ID NO: 85

SEQ ID NO: 1422 - protein, 371 aa, Dolichospermum sp.; identical to SEQ ID NO: 156

SEQ ID NO: 1423 - protein, 379 aa, Crocosphaera sp.; identical to SEQ ID NO: 255

SEQ ID NO: 1424 - protein, 343 aa, unidentified; identical to SEQ ID NO: 193
  REGION 1..343: note = Candidatus Poribacteria bacterium

SEQ ID NO: 1425 - protein, 425 aa, unidentified
  REGION 1..425: note = Ga0373629_0000692
MVVTMQTLTRRLECASIQVSGVEGYKNARVRDLALDNSPEPLNGRAARNGSLSLPYSVEGHSTWTGKSAIGRVPVVSADGKPLMPCRPSKARKLLEKGLAEKRWNKLGVFYLQLKFQPRSELNVNQQVCLAVDPGSKWDGVAVISKKEVLTCGMLVLPSKVAEKLEQRREMRRARRYRKTPRRAKRFDNRRRSDGWIAPSQKAKVDFRIKIVDELCRLYPVSRFAVEDVTFDHYKKRWGKHFSTVEIGKTTFYEHLRKLGELTLYTGVQTAEWRDKLGLPKNPVKRELSWNTHAVDAIAIGCAEVGCENPYPPEFWVWKRFEYARRHLHRLEPDKGDIRRRYGGSWSIPPFRKGDVVMRHGRLARIGGFMGDGISLHSFGLRNKRFTQSADPSECTGLFNQQIFNRREIPQFLPPINEVGFLGGF

SEQ ID NO: 1426 - protein, 400 aa, Calothrix sp.; identical to SEQ ID NO: 1083

SEQ ID NO: 1427 - protein, 389 aa, unidentified; identical to SEQ ID NO: 933
  REGION 1..389: note = uncultured cyanobacterium

SEQ ID NO: 1428 - protein, 414 aa, Anabaena sp.
VVGSRQDILDLVGRGDLNFWKIAPLWAKPKTAFSAYSKDYLFMRVPVISANNTPLMPTKPSRARRWIKAGIAVGKFNKLGIFYVQLKSEPSNTKAQEIVIGLDPGKMFSGIAVQTKKYTLQMLHLVLPFKTVKDRMEQRAMMRRGRRGRRINRKLSFDKRNHRQARFDNRRGSKLPPSIRANKDLEYRTITLLCEIYPVETIVIEEVEARGNKSFSPAMVGQRYQINRLSKLANLELKKGWETSNLRKHLDLYKEKSNKSLEIPETHAVDAVALACSHFFKYQAWAGVKNRGANWIGNIIITNSQFTILRRPPISRRQLHLMVPSKGGTRRKYGGTTTRHGFRKGDFVEATQGKKIFFGWVSGDTEKQVSVSDCNWKRLGQCTAKKVRLIKRNTGLIVLSTRKLSNLTPLRGQI

SEQ ID NO: 1429 - protein, 394 aa, unidentified
  REGION 1..394: note = Ga0315284_10114303
MSDIYQDKPLQVPRDTSLVPSSTGCAKADDVKASKRSSACLREKTCDRRGRISIQSDHSVFVLSKEGKPLTPTTSARARKLLKGKQAEKCWSKFGTFGIKMLVEVGSTTPDTAIGVDNGTKFEGYSIVVGFENSLNVKLDLPDKKVITKKLTERRILRRARRHRNCRRRPARFSNRSRKGFIAPSQSVVVGSRLKVIREFFRIYPINLVAVEDVRFNHAKHRWGKNFSTVEIGKTKIKDYFISHGAEVFEYRGFETQEIRNKYGYTKTSSKSADKFSAHCSDSLSLAVDVITGERIEPGKFIVVNDTYRCKRRKLHDTQPAKGNVREPYSKGTVFGLKKGLLVGLKNCKVGQLCGESNGKYRYYDSEGKRGLASKLVWVSSNFFTRKDGASSVA

SEQ ID NO: 1430 - protein, 299 aa, unidentified
  REGION 1..299: note = Candidatus Poribacteria bacterium
VDPSDRYFQEIVVGVDPGSKKEGFTVKSEAHTYFNVQADAHSKVSKKVEKRRELRRGRRSRKSPNRKHKQHNLSNRERVPAGTRARWDWKLRILQWLSKLYPVTHVCVEDIKARTIERAKKWNQSFSPLEVGKQWFYTEIRKCWKLLTLQGWQTKEIRDKLGLKKSSKKLAETFDAHCVDSWCLAYHTVGGDHSTPDNTDIFCISPIPIRRRELHRQNPQKGGKRPRYGGTVLTDGLIKNTLIKHVKHGLTRLAGINAQGLFSIYSLDGKRLTTGARRTDFQVLTRLNFNYKGGVSSPC

SEQ ID NO: 1431 - protein, 330 aa, unidentified; identical to SEQ ID NO: 962
  REGION 1..330: note = Ga0315294_10032729

SEQ ID NO: 1432 - protein, 390 aa, unidentified; identical to SEQ ID NO: 4
  REGION 1..390: note = Ga0315275_10057549

SEQ ID NO: 1433 - protein, 390 aa, Scytonema sp.; identical to SEQ ID NO: 159

SEQ ID NO: 1434 - protein, 344 aa, unidentified; identical to SEQ ID NO: 575
  REGION 1..344: note = Oscillatoriales cyanobacterium

SEQ ID NO: 1435 - protein, 231 aa, unidentified
  REGION 1..231: note = wastewater metagenome
MVRDGKAVGKWSDAGIYYIQLINQPSDTQVQPIVMGIDPGKKFSGIAVQSAKTTLYLAHLILPFASITKKMTARRILRRTRRGRRIDRRKPFKLRSHRQKRFDNRRQSKLPPSIRANRQLELRIARELCALFPISNIVYEYVEAKGSKSFSPVMVGQKVMLGWLERLAPVTTQFGWQTALIRERLGLVKNKLDKAKQSPETHAVDGIALASSQFVRYESFTQKRARTQMGR

SEQ ID NO: 1436 - protein, 401 aa, Kamptonema sp.
MAGRDELLSLARFITMQRVPVLSPEGKPLMPTKPSRARRWLKEGKAQVAYNDLGTFCVQLLQEPSGEQTQPIAVGLDPGKHYSGIGVQSAKATLWTAHLVLPFKTIVERMELRRIMRRARRGRRINRKLPFEQRCHRQKRFLNRRKGKLPPSIRANRQLELRVVKELCRIYPVSVIHYEKVMADVDRTSGRKGAKSGVGFSPVMVGQTKMLEWLSELAPVKVHQGWQRDGNGTSQSRKRLGLEKNKTDKSQAEPATHAVDGIALAASEFVQWREWHTHNAKHGAVVGEVQITPAPFRIIRRPPISRRQLHLCISAKGGKRRKYGGTVTRHGFRKGDLVKATKAGRVYIGWCSGDTAKAVSVSDLNWKRLGQFTVSKVELLQRSTGLICQQGTSFAGATNVC

SEQ ID NO: 1437 - protein, 363 aa, unidentified; identical to SEQ ID NO: 1227
  REGION 1..363: note = Cyanobacteria bacterium sp.

SEQ ID NO: 1438 - protein, 371 aa, Scytonema sp.; identical to SEQ ID NO: 1166

SEQ ID NO: 1439 - protein, 378 aa, unidentified; identical to SEQ ID NO: 1073
  REGION 1..378: note = Ga0373625_0072956

SEQ ID NO: 1440 - protein, 355 aa, unidentified; identical to SEQ ID NO: 537
  REGION 1..355: note = Candidatus Poribacteria bacterium

SEQ ID NO: 1441 - protein, 372 aa, unidentified; identical to SEQ ID NO: 1174
  REGION 1..372: note = Cyanobacteria bacterium sp.

SEQ ID NO: 1442 - protein, 297 aa, Okeania sp.; identical to SEQ ID NO: 1419

SEQ ID NO: 1443 - protein, 342 aa, unidentified; identical to SEQ ID NO: 628
  REGION 1..342: note = Candidatus Poribacteria bacterium

SEQ ID NO: 1444 - protein, 343 aa, unidentified; identical to SEQ ID NO: 1283
  REGION 1..343: note = wastewater metagenome

SEQ ID NO: 1445 - protein, 340 aa, Desulfitobacterium sp.
VHNKVPVVHQDGTPLMPCSPVKARKLLQKGGAVKKWTEAGIFYIQLTTSTSKHTQPLVLGYDPGAKYDGFCIASKKQMQTSGMIIVENRIKKKLEQRRNMRRARRFRKTRRRPARFNNRKNRENWLPPSIKAKVEMRIAFLKQLLAIYPISQVVVEDVKIDGNKLKGQKGRQYWTWTMVGKTKLYRWLEARTELSLCEPEDTARVRKEYGLTKIGEKKAHVFESQAVDGFALCIATLGTQDKSVTSFSVWRRPENPRRQLHRLEPKKGGIRPPYGGSVTLGFKKNTVVEYKGKLYRTGGTTKGRLSLHSFDYDNRRITQNTKPEECRKVFVQSWFHKKVV

SEQ ID NO: 1446 - protein, 245 aa, Planktothrix sp.
MQRVPVISSNNQPLMPTKSSRARRWIKEGKAIGKFNDLGQFYVQLKVEPLDDKIQPIAVGIDPGKLYSGIGVQSANFTLWTGHLELPFKKVRERMDNRRMMRHGRRGRRINRNIPFNQRAHRQVRFSNRRQGKLSPSIRANRQLELRVVKELFKMFPITDIYFEYVKADVDLTSGRKGAKSGKGFSAVMVGQKYMVNWLSQLATVHTIYGWQTSNLRKYLKLEKSKDKSEQTVKSHAVDGITLAC

SEQ ID NO: 1447 - protein, 153 aa, Microcystis sp.
MRRGRRGRRINRQLSFNLRAHRQKRFSNRRQGKLAPSIRANRQLELRDVSELTKIYPITDIYFEYVKTDIDLTSSRKGAKSRKGFSPVMVRQKWAIEQLSQLAKVHTRFGWQTSNLRKYLRLEKSKNKAKQSPESHANDGIAKREGASHLCNP

SEQ ID NO: 1448 - protein, 577 aa, Desulfurispora sp.
MPCSPAKARKLLRAGAAQKKWTRAGVFYIQLTTPTGKNTQPLIMGIDPGAKYDGICIASRRQMQISGMLVVKNRIAKKMEQRRNMRRARRWRNCRRRPERFNNRTRPEGWLPPSIKARVDTRIALIDSLLSIYPVTEFAVEDTRIDGNKLKNKDGRQYLTWVMTGKTRLYNHLKEKGGLTLYLPEQTVRAREVCGLIKTPGKGELVFTSQAVDALALCWLKAGTENLSVISFMAWRRPEISRRQLHRFEPEKGGKRKPYGGSRVLGIRKNTVVWYRGKLYRTGGTTKGRLSLHSYIDRKKLLTPKGQLYKSIGDDDTVYFDCMPEVARKTLINSTKVEYCTYALNHIEGCAHGCKFPCYAMMMAKRFGKIKTYEDWLRPKKISNIFAILEKEIEKYAGKVKCVHLSFMTDPFMYKHPMLNRYSLNVIYRLNKHGIYVTTLTKGICPKELADTKYFDTRNEYGITLVSLDEKFRKEFEPFAAPYKERIAALKYLHDCGCKTWVSMEPYPTPNLIAQDIRLILQEIAFVDKIVFGKLNYNVNSEKFQNNTDFYQEQAEVVINFCEQNGIEYHIKEGTIC

SEQ ID NO: 1449 - protein, 239 aa, Microcystis sp.
MPTKPSRARRWIKEGKAIGKFNDLDIFYVQLTTEPSDSKTQPIAIGIDPGKLFSGIGVQSSLFTLWKAHLELPFKRVRECLDNRCLMRRGRRKRRINRQLSFNLRAHRQKRFSNRRQGKLAPSIRANRQLELRDVSELTKIYPITDIYFEYVKTDIDLTSSRKGAKSRKGFSPVMVRQKWAIEQLSQLAKVHTRFGWQTSNLRKYLRLEKSKNKAKQSPESHANDGIAKREGASHLCNP

SEQ ID NO: 1450 - protein, 347 aa, Sulfobacillus sp.
MRVPVVGIDGQPLMPTTPRKARMMLRDGVAIPRRNKLGVFYIQMTRPVGMEAQPIVLGVDPGGLHEGLAVASKEGINLCGQVELPKDVHKKMNTRHNLRRGRRYRKTPRRPKRFNNRRRNGYWLAPSQRAKVETRIKAVRELCRIYPISRIVCEDVRHDPRIGQAARWFSTAEIGKRATYKAFSVFAPLELVRAEETATLREKFGLRKITGPHRPQVFESQAVDACALAMNRLDCPLGDPPFQVWRRHAFARRSLHRQNPQKGGIRPRFGGTTNKTFFRKGDWVEIRMKAQTKRGWVCGLPTETTPKIGVQDADGRRIGQFRPYTVRLLARSGGFSWKTSATLLPTA

SEQ ID NO: 1451 - protein, 339 aa, unidentified
  REGION 1..339: note = fermentation metagenome
MHYIPVVHQDGSPLMPCKPSRARKLLKDGAATKKWTKTGIFYIQLTTPTSKHTQPMVMGIDPGANYDGICVTTKKQMQISGMLIVKNNIKRKIEARRNMRRARRWRNCRRRPKRFNNRTRKEGWLPPSIKAKIDIRITFIQSLLNVYPVTEFAVEDTKIDGNKLKGKEGRQYFTWVMTGKTKLYNFLKSKGNLILYRPEETTNTRLDCGLVKTSKKGELVFTSQAVDALALCRLQIGTQNLTVTSFTAWRRPEIPRRQLHRFEPAKGRIRSPYGGSAALGFKKNTVVEYKDKLYRTGGTTKGRISLHSFNFENKRITQNARPEDCKPLFQQSWFAQKVS

SEQ ID NO: 1452 - protein, 406 aa, Sulfobacillus sp.
MFRQFGLSSAEPLNATAFQSLCSLGIVEATITGPQGPRKEYPPMQQPRVPVVARDGTPLMPTTPAHARIMLRDGVARARRNKLGFFYIQMLIPLGTATQPMVLALDPGSKHEGVAVASHKQIEVTAQVNLPDQTHKKMETRRNLRRARRYRKTPRRPKRFDNRRHGRSYWLAPSQLSKVQARLKAVRELCRIYPIQQIIVENVRHDPKIGKQAHFFSTTEIGKTVTLRELQKLAPVTVVESTDTATWRQQFRLTKIQGPNRPEVFETQAVDAVAMLMGITRCAFGNRSFYVFTALRHHRRSLHRQNPQKGRARLPYGGTANGTFFRKGDWVEVTTRRGRLRGWVCGLPTTVTRKVGVAGPAGRRIGQFGIRQVRLLARSGGFTWERRGAALLPPASAVGRSTASVR

SEQ ID NO: 1453 - protein, 340 aa, Desulfitobacterium sp.
VQKKVPVVHQDGTPLMPCSPVKARKLLQNGGAVKKWTKTGIFYIQLTTPTGKHTQPLALGYDPGAKYDGFCVTSEKQMQTSGMLVVENRIKKKLEQRRNMRRARRFRKTRRRPARFNNRKNRENWLPPSIKAKVEMRIAFLKQLLAIYPISQAVVEDVKIDGNRLKGQKGRQYWTWAMVGKTKLYRWLESKTELSLCDPEDTAQVRAEYGLTKIGEKKAHVFESQAVDGLALCISALGTQDKSVTSFSVWRRPENPRRQLHRLEPQKEGIRPPYGGSVALGYKKNTVVEYRGKFYRTGGTTKGRLSLHRFDYDNRRITQNAKSEDCRALFVQNWFQKKVV

SEQ ID NO: 1454 - protein, 406 aa, Sulfobacillus sp.; identical to SEQ ID NO: 1452

SEQ ID NO: 1455 - protein, 347 aa, Sulfobacillus sp.; identical to SEQ ID NO: 1450

SEQ ID NO: 1456 - protein, 367 aa, Sulfobacillus sp.
MPRWGEIPLLSRLCKVEGHETPKGGTNTVQKIPVVHQDGTPLMPCSPSKARKLLKAGAAVRKWTKTGIFYIQLTTPTSKQTQALTLGYDPGAYYDGFAVVSHQQIQTTGMLEVKNKISKKLEQRKNMRRARRFRKTRRRPKRFNNRKRPAGWLPPSIQAKVDMRKTFLKVLLAIYPVRTVVVEDMRIDGNDLKGITGRKYFTWTMENKRPFYDWLRERANLVLYEANDTAQTRHLLGLTKTKKKGEHIFTSQAVDGVALAWMEARTEDLHVPGFTVWRRPEVPRRQLHRFEPEKGGVRKLYGGSRALGFQKNTVVWYQGKLYRTGGTTKGKLSLHTFDFANKRVKQNAKVEGCQPLFVQTWFTKRVI

SEQ ID NO: 1457 - protein, 353 aa, Thermicanus sp.
MVEGHKTPKGGTSTVRKVPVVHMDGTPLMPCTPAKARKLLRSGAAVKKWTKTGIFFIQLTTPTSKHTQDMALGIDPGANYDGVAIATKEQMQFSGMLVVKNRIKDKMETRRNMRRARRFRKTRRRPKRFSNRKRPEGWLPPSIKAKVDMRIQFLSYLFAIYPISKIAVEDMRIDGNRLKGVKGREYFTWTMENKRKLYQFLEGRGDLRLFDAKETAKARETLGLTKTGKKGEHSFYSQAVDGFVLCWLVIRTKRTEVTSFGVWRRPEIARRQLHRLEPEKGGIRKPYGESVACGFRKNTVVWYEGNLYRTGGTTKGKLSLHSFDFANKRVTQHADPAKCQKVFHQSWFYKLVI

SEQ ID NO: 1458 - protein, 340 aa, Desulfitobacterium sp.; identical to SEQ ID NO: 1453

SEQ ID NO: 1459 - protein, 367 aa, Sulfobacillus sp.; identical to SEQ ID NO: 1456

SEQ ID NO: 1460 - protein, 339 aa, Desulfitobacterium sp.
VQNKVPVIHQDGTSLMPCSPIKARKLLQTGGAVKKWTKTGIFYIQLTTPTSKPLALGYDPGANYDGFCVASEKQMQTSGMLVVENRIKKKLEKRRNMRRARRFRKTRRRPARFNNRKNRENWLPPSIKAKVEMRIAFLNQLLAIYPISQAVVEDVKIDGNRLKGQKGRQYWTWAMVGKTKLYRWLRERTELSLLESEDTAKARTEAGLTKIREKKAHVFESQAVDGLALCLLAINTKDICVTNFSVWRRPEIPRRQLHKMRVQKGGIRPPYGGSVALGYKKNTVVEYRGKLYRTGGTSKGRLSLHSYDYDNRRMIRNVKPEQCKKLFMQSWFQEKVIKN

SEQ ID NO: 1461 - protein, 253 aa, Microcystis sp.
MARVPVISKDGKPLMPTKPSRARRWIKEGKAIGKFNDLDIFYVQLTTEPSDSKTQPIAIGINPGKLFSGIGVQSSLFTLWKAHLELPFKRVRECLDNRCLMRRGRRGRRINRQLSFNLRAHRQKRFSNRKQGKLAPSIRANRQLELRVVSELTKIYPITDIYFEYVKTDIDLTSSRKGAKSGKGFSSVMVGQKWAIEQLSQLAKVHTRFGWQTSNLRKYLRLEKSKNKAEQSPESHANDGIAKREGASHLCNP

SEQ ID NO: 1462 - protein, 253 aa, Microcystis sp.
MPRVPVISKDGKSLMPTKPSRARRWIKQGKAIGKFNDLDIFYVQLTTEPSDSKTQPIAIGINPGKLFSGIGVQSSLFTLWKAHLELPFKRVRERLDNRCLMRRGRRGRRINRQLSFNLRAHRQKRFSNRKQGKLAPSIRANRQLELRVVSELTKIYPITDIYFEYVKTDIDLTSGRKGAKSGKGFSSVMVGQKWAIEQLSQLAKVHTRFGWQTSNLRKYLRLEKSKNKAEQSPESHANDGIAKREGASHLCNP

SEQ ID NO: 1463 - protein, 245 aa, Planktothrix sp.; identical to SEQ ID NO: 1446

SEQ ID NO: 1464 - protein, 375 aa, Sulfobacillus sp.
LGICGRIVECHGGSAIRLCLTGIVEGHKTPKGGTNTVQKIPVVHQDGTPLMPCSPSKARRLLKAGAAIRQWTKTGIFYLQLTTPTSAHTQAMVLGHDPGAHYDGVAIATAQQVQMTGMLVVKNHISKKLKQRRNMRRARRFRKTRRRPARSDNRKRPAGWLPPSIQAKVEIRKALLKDLLAIYPITTVVVEDMRIDGNQLKAVKGQKYFTWTMENKRPFYDWIRARVQLVLYEPSDTAQTRHLLGLAKTKKKGEHVFTSQAVDGLALAWMDAKTKDLRVPSFTVWRRPEVPRRQLHRFEPEKGGVRKPYGGSQALGFTKNTVVRYRGTLYRTGGTTKGKLSLHTFDFANKRVTQNAKGEECQPLFVQTWFSKRVI

SEQ ID NO: 1465 - protein, 253 aa, Microcystis sp.
MARVPVISKDGKPLMPTKPSRARRWIKEGKAIGKFNDLDIFYVQLTTEPSDSKTQPIAIGINPGKLFSGIGVQSSLFTLWKAHLELPFKRVRECLDNRCLMRRGRRKRRINRQLSFNLRAHRQKRFSNRRQGKLSPSIRANRQLELRVVSELTKIYPITDIYFEYVKTDIDLTSSRKGAKSGKGFSSVMVGQKWAIEQLSQLAKVHTRFGWQTSNLRKYLRLEKSKNKAKQSPESHANDGIAKRERASHLCNP

SEQ ID NO: 1466 - protein, 253 aa, Microcystis sp.; identical to SEQ ID NO: 1461

SEQ ID NO: 1467 - protein, 253 aa, Microcystis sp.; identical to SEQ ID NO: 1461

SEQ ID NO: 1468 - protein, 253 aa, Microcystis sp.; identical to SEQ ID NO: 1462

SEQ ID NO: 1469 - protein, 253 aa, Microcystis sp.; identical to SEQ ID NO: 1461

SEQ ID NO: 1470 - protein, 253 aa, Microcystis sp.
IARVPVISKDGKSLMPTKPSRARRWIKEGKAIGKFNDLDIFYVQLTTEPSDNKTQPIAIGINPGKLFSGIGVQSSLFTLWKAHLELPFKRVRECLDNRCLMRRGRRKRRINRQLSFNLRSHRQKRFSNRKQGKLAPSIRANRQLELRDVSELTKIYPITDIYFEYVKTDIDLTSSRKGAKSGKGFSPVMVRQKWAIEQLSQLAKVHTRFGWQTSNLRKYLRLEKSKNKAEQSPESHANDGIAKREGASHLCNP

SEQ ID NO: 1471 - protein, 339 aa, Desulfitobacterium sp.; identical to SEQ ID NO: 1460

SEQ ID NO: 1472 - protein, 191 aa, Microcystis sp.
MLPLFSGIGVQSSLFTLWKAHLELPFKRVRECMDNRRLMRRGRRKRRINRQLPFNLRAHRQKRFSNRKQGKLAPSIKANRQLELRVVSELTKIYPITDIYFEYIKADIDLTSSRKGAKSRKGFSPVMVGQKWAIEQLSQLATVHTRFGWQTSNLRKHLRLEKSKNKAEQSPESHANDGIAKREGASHLCNP

SEQ ID NO: 1473 - protein, 339 aa, Ammonifex sp.
VQKVPVVHLDATPLMPCSPSKARRLLKSGGAVKKWTKTGIFYIQLTTPTGKHTQPLALGYDLGAKYDGLCVASEKRMQTSGMLVVDNRIAKKMERRRNMRRARRFRKTRRRPARFDNRSKPEGWLPPSIKAKVEMRIRFLKHLLAIYPITTVAVEDVKMDGNKLKGQKGRKYWTWVMVGKTKLYQWLKQYVELTLYERSDTVRVRTEAGLRKVSKKGARVFESQAVDGLALCLLALGTKDTAVTGFSVWRTPDVPRRQLHRLEPGKGGIRPPYGGSVALSFKKNTVVEYHGKLYRTGGTTKGRLSLHSFDLDNRRVTQNAKPEQCKKLFVQTWFQKKVI

SEQ ID NO: 1474 - protein, 248 aa, Microcystis sp.
MARVPVISKDGKPLMPTKPSRARRWIKEGKAIGKFNDLDIFYVQLTTEPSDSKTQPIAIGINPGKLFSGIGVQSSLFTLWKAHLELPFKRVRECLDNRCLMRRGRRGRRINRQLSFNLRAHRQKRFSNRKQGKLAPSIRANRQLELRVVSELTKIYPITDIYFEYVKTDIDLTSSRKGAKSGKGFSSVMVGQKWAIEQLSQLAKVHTRFGWQTSNLRKYLRLEEHLTFVTPKSGFMSSYFESLARNQF

SEQ ID NO: 1475 - protein, 253 aa, Microcystis sp.
MARVPVISKDGKSLMPTKPSRARRWIKEGKAIGKFNDLDIFYVQLTTEPSDSKTQPIAIGINPGKLFSGIGVQSSLFTLWKAHLELPFKRVRECLDNRCLMRRGRRGRRINRQLSFNLRAHRQKRFSNRKQGKLAPSIRANRQLELRVVSELTKIYPITDIYFEYIKADIDLTSSRKGAKSGKGFSSVMVGQKWAIEQLSQLAKVHTRFGWQTSNLRKYLRLEKSKNKAKQSPESHANDGIAKREGASHLCNP

SEQ ID NO: 1476 - protein, 174 aa, Microcystis sp.
WKAHLELPFKRVKERIDNRCLMRRGRRGRRINRQLSFNLRAHRQKRFSNRRQGKLAPSIRANRQLELRDVSELTKIYPITDIYFEYVKTDIDLTSSRKGAKSRKGFSPVMVRQKWAIEQLSQLAKVHTRFGWQTSNLRKYLRLEKSKNKAKQSPESHANDGIAKREGASHLCNP

SEQ ID NO: 1477 - protein, 352 aa, unidentified
  REGION 1..352: note = hot springs metagenome
MHSVFVLSIEGKPLTPTTPARARKLLEAGVAQKAWSKFGTFGIQLLVESRTEVPLTTWGYDGGAKFEGFAVMCGRENVLAIKLDLPDKQPIVRKLEERRTLRRARHFRRCRRRPARFDNRRRKLDWIAPSQLVMVQSRLKVLAALFAICPIQRVGLDDVRFNHAKYRWGANFSTLEIGKTRIQNWLTERAEVTRYPDWQMISFAERTLAASGGEIKALRKQYGYPKTVVKSADKFSAHCSDALALACAVGMNAPVAAGRFIVVDDTYRPVRRRLHDTQPAKGGVRAAYSTGTVFGLRKGLLIGTKNGKTGRLSGKLPKGIRYYDAEGKRQSTSALQWISTQFITRVKGEPSP

SEQ ID NO: 1478 - protein, 245 aa, Planktothrix sp.; identical to SEQ ID NO: 1446

SEQ ID NO: 1479 - protein, 324 aa, Thermoacetogenium sp.
MPCSPAKARKLIRDGGAVKKWTRTGVFYIQLTTLTSKHTQPLAMGIDPGAKYDGVCIASERQMQTSGMLIVKNNIVSRMEQRRNMRRTRRSRKTRRRPKRFNNRKVEKGWLPPSIKAKVNMRIALIKSLLTIYPVAEFAVEDVRIDGNKLKGKKGRQYFTWVMTGKTRLYDYLRKCGLLTLYQREDTALARRICNLTKTAKKSELVFTSQAVDALALCWLKLHTRDLSVTSFLAWRRPEIVRRQLHKFEPSEGGIRRRYGGGDALGFKKNTVVQYRGDLYRTGGTTKGRLSLHSFDFENRRVIRNALPEECKKLFHQTWFVKTA

SEQ ID NO: 1480 - protein, 359 aa, unidentified
  REGION 1..359: note = Deltaproteobacteria bacterium sp.
MYQPKRVPVLGADGSPLMPTTPRKARLMLRDGIAVPRRNKLGVFHIQMLRPVGTAVQPMVLGVDLGGLHEGLAVASKEGVNICGQMELPADVHKKMETRRNLRRARRHRKTPRRPQRFSNRRRNGYWLAPSQRAKVHARVNTVRELCRIYPVRRIVCEDVRHDPKIGKGARWFSTAEVGKKATYDTFAALAPLRLATAGETAELRERFGLSKLGGPRRPQVFEAQAVDACALAMGEVGCPLGAPLFWVWRRHEFSRRSLHRQNPQRGGVRPRFGGTTNGGFFRKGDWVEVHAKVGTFRGWVCGLPTERTPKVGVEDADGHRIGQFGPRAVRLLTRSGGFSWKEGAALIPMAEARGFRAA

SEQ ID NO: 1481 - protein, 340 aa, Desulfitobacterium sp.; identical to SEQ ID NO: 1445

SEQ ID NO: 1482 - protein, 253 aa, Microcystis sp.; identical to SEQ ID NO: 1462

SEQ ID NO: 1483 - protein, 342 aa, Desulfitobacterium sp.
VQISAKIPVIHQDGTPLMPCSPVKARKLLQNGGAVKKWTKIGIFYIQLTTSTSKHTQPLVLGYDPGAKYDGFCVASEKQMQTSGMLVVENRIKKKLEQRRNMRRARRFRKTRRRPARFNNRKNRKDWLPPSIKAKVEMRITFLKQLLAIYPISQAVVEDVKIDGNRLKGQKGRQYWTWAMVGKTKLYRWLESKTELSLCDPEDTAQVRAEYGLTKIGEKKAHVFESQAVDGLALCISALGTQDKSVTSFSVWRRPENPRRQLHRLEPQKEGIRPPYGGSVALGYKKNTVVEYRGKFYRTGGTTKGRLSLHRFDYDNRRITQNAKSEDCRALFVQNWFQKKVV

SEQ ID NO: 1484 - protein, 339 aa, unidentified
  REGION 1..339: note = fermentation metagenome
VQKVPVVHQDGTPLMPCSPAKARKLLTNGGAVRKWTKTGVFYIQLTTTTGKHTQPLVLGYDPGAKYDGFCVTSEKQMQTSGMLVVDNRIAKKMEQRRNMRRARRYRKTRRRPARFDNRKKPEGWLPPSIKAKVDMRIQFLKHLLAIYPISTAIVEDVKIDGNKLKGQKGRQYWTWAMAGKTKLYKWLRERTELTLSEPSDTAQARAEAGLEKISDKKAHVFESQAVDGLALCLLVIATKDTSVTGFSVWRRPEIPRRQLHRLEPKKGGIRSPYGGSMALGFKKNTVVEYKGQLYRTGGTTKGRLSLHSCDYKNRRVTQNAKPEQCKKQFVQTWFQEKVI

SEQ ID NO: 1485 - protein, 216 aa, Microcystis sp.
LDIFYVQLTDEPSDNKNQPIAIGINPGKLFSGIGVQSSLFTLWKAHLELPFKRVRECLDNRCLMRRGRRGRRINRQLPFNLRAHRQKRFSNRRTGKLAPSIRANRQLELRVVSELTKIYPITDIYFEYVKTDIDLTSSRKGAKSGKGFSPVMVRQKWAIEQLSQLAKVHTRFGWQTSNLRKYLRLEKSKNKAKQSPESHANDGIAKREGASHLCNP

SEQ ID NO: 1486 - protein, 351 aa, Microcystis sp.
  VARIANT 240..295: note = Xaa can be any naturally occurring amino acid
MARVPVISKDGKPLMPTKPSRARRWIKEGKAIGKFNDLGIFYVQLIDEPSDSKTQPIAIGIDPGKLFSGIGVQSSLFTLWKAHLELPFKRVKERMDNRRLMRRGRRGRRINRQLSFNLRAHRQKRFSNRKQGKLAPSIRANRQLELRVVSELTKIYPITDIYFEYIKADIALTSRRKGAKSGKGFSPVMVGQKWAIEQLSQLATVHTRFGWQTSILRKYLGLEKSKNKAEQSPESHANDXXXXXXXXXXXXXXXXXXXXXXXXXXXXXXXXXXXXXXXXXXXXXXXXXXXXXXXXGFRKGDLVSSPKGIGYVSGDTEKQLSVSDANGQRLGQIAVSKIQLIRRSNGLIVSH

SEQ ID NO: 1487 - protein, 191 aa, Microcystis sp.; identical to SEQ ID NO: 1472

SEQ ID NO: 1488 - protein, 245 aa, Planktothrix sp.; identical to SEQ ID NO: 1446

SEQ ID NO: 1489 - protein, 351 aa, Microcystis sp.; identical to SEQ ID NO: 1486
  VARIANT 240..295: note = Xaa can be any naturally occurring amino acid

SEQ ID NO: 1490 - protein, 577 aa, Desulfitobacterium sp.; identical to SEQ ID NO: 1448

SEQ ID NO: 1491 - protein, 253 aa, Microcystis sp.
MARVPVISKDGKSLMPTKPSRARRWIKQGKAIGKFNDLDIFYVQLTTEPSDSKTQPIAIGINPGKLFSGIGVQSSLFTLWKAHLELPFKRVRERLDNRCLMRRGRRGRRINRQLSFNLRAHRQKRFSNRKQGKLAPSIRANRQLELRVVSELTKIYPITDIYFEYVKTDIDLTSSRKGAKSGKGFSPVMVRQKWAIEQLSQLAKVHTRFGWQTSNLRKYLRLEKSKNKAEQSPESHANDGIAKREGASHLCNP

SEQ ID NO: 1492 - protein, 240 aa, Microcystis sp.
MPRVPVISKDGKPLMPTKPSRARRWIKEGKAIGKFNDLGIFYVQLTTESSNNKTQPIAIGIDPGKLFSGIGVQSSLFTLWKAHLELPFKRVKERIDNRRLMRRGRRGRRINRQLSFNLRAHRQKRFSNRKQGKLAPSIRANRQLELRVVSELTKIYPITDIYFEYVKTDIDLTSGRKGAKSGKGFSPVMVRQKWAIEQLSQLAKVHTRFGWQTSNLRKYLRLEKSKNKAEQSPESHANDG

SEQ ID NO: 1493 - protein, 253 aa, Microcystis sp.
MARVPVISKDGKPLMPTKPSRARRWIKEGKAIGKFNDLDIFYVQLTTEPSDNKTQPIAIGINPGKLFSGIGVQSSLFTLWKAHLELPFKRVRECIDNRCLMRRGRRKRRINRQLPFNLRAHRQKRFSNRRQGNELPSIRANRQLELRVVSELTKIYPITDIYFEYVKTDIDLTSGRKGAKSGKGFSSVMVGQKWAIEQLSQLAKVHTRFGWQTSNLRKYLRLEKSKNKAKQSPESHANDGIAKREGASHLCNP

SEQ ID NO: 1494 - protein, 342 aa, Desulfitobacterium sp.; identical to SEQ ID NO: 1483

SEQ ID NO: 1495 - protein, 245 aa, Planktothrix sp.; identical to SEQ ID NO: 1446

SEQ ID NO: 1496 - protein, 339 aa, unidentified; identical to SEQ ID NO: 1451
  REGION 1..339: note = fermentation metagenome

SEQ ID NO: 1497 - protein, 353 aa, Thermicanus sp.; identical to SEQ ID NO: 1457

SEQ ID NO: 1498 - protein, 216 aa, Microcystis sp.; identical to SEQ ID NO: 1485

SEQ ID NO: 1499 - protein, 324 aa, unidentified; identical to SEQ ID NO: 1479
  REGION 1..324: note = fermentation metagenome

SEQ ID NO: 1500 - protein, 153 aa, Microcystis sp.
MRRGRRKRRINRQLSFNLRSHRQKRFSNRKQGKLAPSIRANRQLELRDVSELTKIYPITDIYFEYVKTDIDLTSSRKGAKSRKGFSPVMVRQKWAIEQLSQLAKVHTRFGWQTSNLRKYLRLEKSKNKAEQSPESHANDGIAKREGASHLCNP

SEQ ID NO: 1501 - protein, 216 aa, Microcystis sp.; identical to SEQ ID NO: 1485

SEQ ID NO: 1502 - protein, 375 aa, Sulfobacillus sp.; identical to SEQ ID NO: 1464

SEQ ID NO: 1503 - protein, 216 aa, Microcystis sp.; identical to SEQ ID NO: 1485

SEQ ID NO: 1504 - protein, 253 aa, Microcystis sp.
MARVPVISKDGKSLMPTKPSRARRWIKQGKAIGKFNDLDIFYVQLTTEPSDSKTQPIAIGINPGKLFSGIGVQSSLFTLWKAHLELPFKRVRECLDNRCLMRRGRRGRRINRQLSFNLRAHRQKRFSNRKQGKLAPSIRANRQLELRVVSELTKIYPITDIYFEYIKADIDLTSSRKGAKSGKGFSSVMVGQKWAIEQLSQFATVHTRFGWQTSNLGKYLRLEKSKNKAKQSPESHAKDGIAKREGASHLCNP

SEQ ID NO: 1505 - protein, 240 aa, Microcystis sp.; identical to SEQ ID NO: 1492

SEQ ID NO: 1506 - protein, 253 aa, Microcystis sp.; identical to SEQ ID NO: 1470

SEQ ID NO: 1507 - protein, 339 aa, Syntrophomonas sp.; identical to SEQ ID NO: 1451

SEQ ID NO: 1508 - protein, 218 aa, Microcystis sp.
  VARIANT 100..133: note = Xaa can be any naturally occurring amino acid
MARVPVISKDGKPLMPTKPSRARRWIKEGKAIGKFNDLDIFYVQLTTEPSDNKTQPIAIGIDPGKLFSGIGVQSSLFTLWKAHLELPFKRVRECLDNRCXXXXXXXXXXXXXXXXXXXXXXXXXXXXXXXXXXDIYFEYIKADIDLTSSRKGAKSGKGFSSVMVGQKWAIEQLSQLAKVHTRFGWQTSNLRKYLRLEKSKNKAKQSPESHANDGIAKR

SEQ ID NO: 1509 - protein, 245 aa, Planktothrix sp.; identical to SEQ ID NO: 1446

SEQ ID NO: 1510 - protein, 245 aa, Planktothrix sp.; identical to SEQ ID NO: 1446

SEQ ID NO: 1511 - protein, 253 aa, Microcystis sp.; identical to SEQ ID NO: 1462

SEQ ID NO: 1512 - protein, 253 aa, Microcystis sp.; identical to SEQ ID NO: 1461

SEQ ID NO: 1513 - protein, 154 aa, Microcystis sp.
LMRKGRRGRRINRQLPFNLRAHRQKRFSNRRQGKLAPSIRANRQLELRVVSELTKIYPITDIYFEYVKADIDLTSGRKGAKSGKGFSSVMVGQKWAIEQLSQLATVHTRFGWQTSNLRKYLRLEKSKNKAEQSPESHANDGIALACFQFLDYWP

SEQ ID NO: 1514 - protein, 216 aa, Microcystis sp.; identical to SEQ ID NO: 1485

SEQ ID NO: 1515 - protein, 153 aa, Microcystis sp.; identical to SEQ ID NO: 1500

SEQ ID NO: 1516 - protein, 224 aa, Microcystis sp.
MARVPVISKDGKPLMPTKPSRARRWIKEGKAIGKFNDLDIFYVQLTTEPSDSKTQPIAIGINPGKLFSGIGVQSSLFTLWKAHLELPFKRVRECLDNRCLMRRGRRGRRINRQLSFNLRAHRQKRFSNRKQGKLAPSIRANRQLELRVVSELTKIYPITDIYFEYVKTDIDLTSSRKGAKSGKGFSSVMVGQKWAIEQLSQLAKVHTRFGWQTSNLRKYLRLEE

SEQ ID NO: 1517 - protein, 253 aa, Microcystis sp.; identical to SEQ ID NO: 1462

SEQ ID NO: 1518 - protein, 245 aa, Planktothrix sp.; identical to SEQ ID NO: 1446

SEQ ID NO: 1519 - protein, 253 aa, Microcystis sp.; identical to SEQ ID NO: 1493

SEQ ID NO: 1520 - protein, 322 aa, unidentified
  REGION 1..322: note = fermentation metagenome
MHYVPVVHQDGSPLMPCKPSRARKLLKDGAAVKKWTKTGIFYIQLTTPTSKHTQPMVIGIDPGANYDGICITTKKQMQMSGMLIVKNNIKKKIEARRNMRRARRWRNCRRRPKRFNNQTRKEGWLPPSIKAKVDTRITFIQSLLNIYPIIEFAVEDTKIDGNKLKGKKGRQYFTWVMTGKTKLYNFLKTKGNLTLYNPEETTNSRLNCGLIKTPKKSELIFTSQAVDALALCWLQIGTQNLAATSFTVWHRPEIPRRQLHRFEPAKGEIRSPYGGSTSLGFKKNTVVQYKDKLYRTGGTTKGRLSLHSFDFENESLFPNRNR

SEQ ID NO: 1521 - protein, 174 aa, Microcystis sp.; identical to SEQ ID NO: 1476

SEQ ID NO: 1522 - protein, 216 aa, Microcystis sp.; identical to SEQ ID NO: 1485

SEQ ID NO: 1523 - protein, 239 aa, Microcystis sp.
MPTKPSRARRWIKQGKAIGKFNDLGIFYVQLTTESSNNKTQPIAIGINPGKLFSGIGVQSSLFTLWKAHLELPFKRVRECLDNRCLMRRGRRGRRINRQLSFNLRAHRQKRFSNRKQGKLAPSIRANRQLELRVVSELTKIYPITDIYFEYIKADIDLTSSRKGAKSRKGFSSVMVGQKWAIEQLSQLAKVHTRFGWQTSNLRKYLRLEKSKNKAKQSPESHANDGIAKREGASHLCNP

SEQ ID NO: 1524 - protein, 4 aa, synthetic construct
  REGION 1..4: note = Synthetic
PLMP

SEQ ID NO: 1525 - DNA, 12 bp, synthetic construct
  misc_feature 1..12: note = Synthetic
  source 1..12: mol_type = other DNA
acttgtttaagt

SEQ ID NO: 1526 - skipped

SEQ ID NO: 1527 - protein, 7 aa, Simian virus 40
PKKKRKV

SEQ ID NO: 1528 - protein, 16 aa, synthetic construct
  REGION 1..16: note = Synthetic
KRPAATKKAGQAKKKK

SEQ ID NO: 1529 - protein, 9 aa, Homo sapiens
PAAKRVKLD

SEQ ID NO: 1530 - protein, 11 aa, Homo sapiens
RQRRNELKRSP

SEQ ID NO: 1531 - protein, 38 aa, Homo sapiens
NQSSNFGPMKGGNFGGRSSGPYGGGGQYFAKPRNQGGY

SEQ ID NO: 1532 - protein, 42 aa, Homo sapiens
RMRIZFKNKGKDTAELRRRRVEVSVELRKAKKDEQILKRRNV

SEQ ID NO: 1533 - protein, 8 aa, Homo sapiens
VSRKRPRP

SEQ ID NO: 1534 - protein, 8 aa, Homo sapiens
PPKKARED

SEQ ID NO: 1535 - protein, 8 aa, Homo sapiens
PQPKKKPL

SEQ ID NO: 1536 - protein, 12 aa, Mus sp.
SALIKKKKKMAP

SEQ ID NO: 1537 - protein, 5 aa, Influenza virus
DRLRR

SEQ ID NO: 1538 - protein, 7 aa, Influenza virus
PKQKKRK

SEQ ID NO: 1539 - protein, 10 aa, Hepatitis D virus
RKLKKKIKKL

SEQ ID NO: 1540 - protein, 10 aa, Mus sp.
REKKKFLKRR

SEQ ID NO: 1541 - protein, 20 aa, Homo sapiens
KRKGDEVDGVDEVAKKKSKK

SEQ ID NO: 1542 - protein, 17 aa, Homo sapiens
RKCLQAGMNLEARKTKK

SEQ ID NO: 1543 - protein, 4 aa, synthetic construct
  REGION 1..4: note = Synthetic
GGGS

SEQ ID NO: 1544 - protein, 5 aa, synthetic construct
  REGION 1..5: note = Synthetic
GGGGS

SEQ ID NO: 1545 - protein, 9 aa, synthetic construct
  REGION 1..9: note = Synthetic
GGSGGSGGS

SEQ ID NO: 1546 - protein, 15 aa, synthetic construct
  REGION 1..15: note = Synthetic
GGGGSGGGGSGGGGS

SEQ ID NO: 1547 - protein, 10 aa, synthetic construct
  REGION 1..10: note = Synthetic
GGGGSGGGGS

SEQ ID NO: 1548 - protein, 20 aa, synthetic construct
  REGION 1..20: note = Synthetic
GGGGSGGGGSGGGGSGGGGS

SEQ ID NO: 1549 - protein, 25 aa, synthetic construct
  REGION 1..25: note = Synthetic
GGGGSGGGGSGGGGSGGGGSGGGGS

SEQ ID NO: 1550 - protein, 30 aa, synthetic construct
  REGION 1..30: note = Synthetic
GGGGSGGGGSGGGGSGGGGSGGGGSGGGGS

SEQ ID NO: 1551 - protein, 35 aa, synthetic construct
  REGION 1..35: note = Synthetic
GGGGSGGGGSGGGGSGGGGSGGGGSGGGGSGGGGS

SEQ ID NO: 1552 - protein, 40 aa, synthetic construct
  REGION 1..40: note = Synthetic
GGGGSGGGGSGGGGSGGGGSGGGGSGGGGSGGGGSGGGGS

SEQ ID NO: 1553 - protein, 45 aa, synthetic construct
  REGION 1..45: note = Synthetic
GGGGSGGGGSGGGGSGGGGSGGGGSGGGGSGGGGSGGGGSGGGGS

SEQ ID NO: 1554 - protein, 50 aa, synthetic construct
  REGION 1..50: note = Synthetic
GGGGSGGGGSGGGGSGGGGSGGGGSGGGGSGGGGSGGGGSGGGGSGGGGS

SEQ ID NO: 1555 - protein, 56 aa, synthetic construct
  REGION 1..56: note = Synthetic
GGGGSGGGGSGGGGSGGGGSGGGGSGGGGSGGGGSGGGGSGGGGSGGGGSGGGGSF

SEQ ID NO: 1556 - protein, 60 aa, synthetic construct
  REGION 1..60: note = Synthetic
GGGGSGGGGSGGGGSGGGGSGGGGSGGGGSGGGGSGGGGSGGGGSGGGGSGGGGSGGGGS

SEQ ID NO: 1557 - protein, 32 aa, synthetic construct
  REGION 1..32: note = Synthetic
LEPGEKPYKCPECGKSFSQSGALTRHQRTHTR

SEQ ID NO: 1558 - protein, 20 aa, synthetic construct
  REGION 1..20: note = Synthetic
PKKKRKVEASSPKKRKVEAS

SEQ ID NO: 1559 - DNA, 21 bp, synthetic construct
  misc_feature 1..21: note = Synthetic
  source 1..21: mol_type = other DNA
ggsggsggsggsggsggsggs

SEQ ID NO: 1560 - DNA, 27 bp, synthetic construct
  misc_feature 1..27: note = Synthetic
  source 1..27: mol_type = other DNA
ggtggtagtggagggagcggcggttca

SEQ ID NO: 1561 - DNA, 72 bp, synthetic construct
  misc_feature 1..72: note = Synthetic
  source 1..72: mol_type = other DNA
ggtggaggaggctctggtggaggcggtagcggaggcggagggtcgggtggtagtggagggagcggcggttca

SEQ ID NO: 1562 - DNA, 48 bp, synthetic construct
  misc_feature 1..48: note = Synthetic
  source 1..48: mol_type = other DNA
tcgggatctgagacgcctgggacctcggaatcggctacgcccgaaagt

SEQ ID NO: 1563 - DNA, 192 bp, synthetic construct
  misc_feature 1..192: note = Synthetic
  source 1..192: mol_type = other DNA
gtggataacaaatttaacaaagaaatgtgggcggcgtgggaagaaattcgtaacctgccgaacctgaacggctggcagatgaccgcgtttattgcgagcctggtggatgatccgagccagagcgcgaacctgctggcggaagcgaaaaaactgaacgatgcgcaggcgccgaaaaccggcggtggttctggt

SEQ ID NO: 1564 - DNA, 108 bp, synthetic construct
  misc_feature 1..108: note = Synthetic
  source 1..108: mol_type = other DNA
ggtggttctgccggtggctccggttctggctccagcggtggcagctctggtgcgtccggcacgggtactgcgggtggcactggcagcggttccggtactggctctggc

SEQ ID NO: 1565 - protein, 9 aa, synthetic construct
  REGION 1..9: note = Synthetic
IEVMYPPPY

SEQ ID NO: 1566 - DNA, 10 bp, synthetic construct
  source 1..10: mol_type = other DNA
ccccctcccc

SEQ ID NO: 1567 - RNA, 123 nt, synthetic construct
  source 1..123: mol_type = other RNA; note = trcrRNA
nnasrcacyysggatgctncycyagtccsrngctctgyrgyynnksrktaaacannnnnnnrggnnnnrancrgtgnnnnnnrnnnnnnansnnnnnnyaacattgkcgargrgaannnwncn

SEQ ID NO: 1568 - RNA, 95 nt, synthetic construct
  source 1..95: mol_type = other RNA; note = tracrRNA
gaagtgcaacctggggtgcgccttcagctccaggctctgcacccagaggactaacgtgaagggagggtcgaggccacaaggcaagctggaccata

SEQ ID NO: 1569 - RNA, 96 nt, synthetic construct
  source 1..96: mol_type = other RNA; note = tracrRNA
ggagtgcaacctggggtgcaccttcagctccaggctctgcacccagaggattaacgcgcaagggagggtcgaggccgcaaggcaagccgagccata

SEQ ID NO: 1570 - RNA, 116 nt, synthetic construct
  source 1..116: mol_type = other RNA; note = tracrRNA
aagtatcactttaaaatgttcgatccagttttaaaccctgataccttataagtaggacccaggaaaaaatagtgtgactatcctacaccagcaaagttgggcaaggatcaaattaa

SEQ ID NO: 1571 - RNA, 115 nt, synthetic construct
  source 1..115: mol_type = other RNA; note = tracrRNA
aagactcaccttgagatgaagttccagtctcaagctctgagactttctgaggaagaatcaattggaaggcaatgacgcgcgatgctcttgtcaactttgacgaggagcatcgata

SEQ ID NO: 1572 - RNA, 112 nt, synthetic construct
  source 1..112: mol_type = other RNA; note = tracrRNA
aagacgcacttcagggtaatgccccagctctgaaccctgcgactgtggaggaggaatcaaagtgaaaggtaatgacgtgcaaggcacctctcaacattggcaaggggcttta

SEQ ID NO: 1573 - RNA, 58 nt, synthetic construct
  source 1..58: mol_type = other RNA; note = tracrRNA
caaaacaacagaatgcttcccaagttttgtctctatggtggtcagcggcgatgggatg

SEQ ID NO: 1574 - RNA, 113 nt, synthetic construct
  source 1..113: mol_type = other RNA; note = tracrRNA
aaaacatacctttggatataatcttcagtctaaagctctatgattattgaggatgacaagttgtagtcaaacaccatatatattttctactgtcattggcaagaaggaaattt

SEQ ID NO: 1575 - RNA, 119 nt, synthetic construct
  source 1..119: mol_type = other RNA; note = tracrRNA
cgatcgtacctgcgcgtgcgaggccagcgtgcagctctccaacccgggttaaacagggcgtgggtatacccagtgctcgtcgtgtgccgcctgagaacatcgtcgaggccaccattacc

SEQ ID NO: 1576 - RNA, 119 nt, synthetic construct
  source 1..119: mol_type = other RNA; note = tracrRNA
ggaacacctttaggtgcaagcccagccttctgctctgtcgctgatagttaaacaggttcaagtgtaccagtgctattagcctaacaagcctagataacattgacgaggcacacttcacc

SEQ ID NO: 1577 - RNA, 102 nt, synthetic construct
  source 1..102: mol_type = other RNA; note = tracrRNA
ttaagtaccaagaaatgccaccctagtttcttgctctacgctagaaccgtttaatagcacgtttagttaagcttttctaactttgtcgaagggtagtaaata

SEQ ID NO: 1578 - RNA, 119 nt, synthetic construct
  source 1..119: mol_type = other RNA; note = tracrRNA
gttcctaccgacgagtacgttgccagcttgtcgctctagaacaaaagttaaacagcttaaaacgaggcagtgcttttcagagagtaccgagacgtaaccttggcgaggcaaacgttacc

SEQ ID NO: 1579 - RNA, 102 nt, synthetic construct
  source 1..102: mol_type = other RNA; note = tracrRNA
gacagctaccctggaatgtgtccagttccaggctctagcggtatcaaaggacgaatgattaacatctaaccaggcccggaaactttgccgaggacaacaatt

SEQ ID NO: 1580 - RNA, 102 nt, synthetic construct
  source 1..102: mol_type = other RNA; note = tracrRNA
cataggcactccggggtgctcttccagctccggaccctgcgggcagggatcatgagaccggtcgatgccgaacccggtcggccctgggcgaggaagcctgaa

SEQ ID NO: 1581 - RNA, 107 nt, synthetic construct
  source 1..107: mol_type = other RNA; note = tracrRNA
aaacaactccaaagatactccacaagtcttggacaattgggaagaatcgtttaattccatgagcgacaacgctaagcatttgcattatggcggatgtgggtgtaacc

SEQ ID NO: 1582 - RNA, 118 nt, synthetic construct
  source 1..118: mol_type = other RNA; note = tracrRNA
agacccactccgggatgcttccccagtcccggaccctggaagccccggctgcagacaaccttcgggaaacgggccggggcacgtgccggccggcaacatggccgaggggagcgcggag

SEQ ID NO: 1583 - RNA, 115 nt, synthetic construct
  source 1..115: mol_type = other RNA; note = tracrRNA
tgacacccttggatgcttctccagtctaaggccctgtcgcccgtcattaaacgccagctaggggagccgtgtggcgggccggacaagccgtctgaaccttggcgaggagagattt

SEQ ID NO: 1584 - RNA, 96 nt, synthetic construct
  source 1..96: mol_type = other RNA; note = tracrRNA
acggacttccgagtgtttccctagttcggattctctaaaccgactgatatcgtcagacaggacatctatttgttggtggtctaagggaatacaact

SEQ ID NO: 1585 - RNA, 103 nt, synthetic construct
  source 1..103: mol_type = other RNA; note = tracrRNA
cgaacaccccggggtgcttccccagccccgggctctgatgctggatgtcccgggcatccgggctcccgacagcccgcacgctccgggggaggggacgcctccc

SEQ ID NO: 1586 - RNA, 130 nt, synthetic construct
  source 1..130: mol_type = other RNA; note = tracrRNA
caagacgcactccggaacgcttctccaattccagaccctgtaaggtctcggcaatgcaagcgaaaggcaaagcgccgaatgccgggatcgctccggaggagccggtcgtatacataggcgaggagaacgt

SEQ ID NO: 1587 - RNA, 95 nt, synthetic construct
  source 1..95: mol_type = other RNA; note = tracrRNA
aggaaccgtacttatgctcscccagtaagtaccttcaagttctagttgtataggaaccgacatccaattagctggtgtccgagggtttgactact

SEQ ID NO: 1588 - RNA, 120 nt, synthetic construct
  source 1..120: mol_type = other RNA; note = tracrRNA
tgacaccttggggtattcgcacgctccaggctctgtcgccggtgattaaaagtcctgagaggcagggacggtgttgccggcatgacaagccactccaacaaccccgatgcggcgcttaca

SEQ ID NO: 1589 - RNA, 106 nt, synthetic construct
  source 1..106: mol_type = other RNA; note = tracrRNA
aaagccaaagggcggctcccatctgcgcgcggttcaggcaacggatggtcccttgagtggggaccgacctggtgccaagcgcaccggacacaggcgaggggcgaag

SEQ ID NO: 1590 - RNA, 122 nt, synthetic construct
  source 1..122: mol_type = other RNA; note = tracrRNA
ataggcaccgtgggatgtacatcctagttccacgcactgcggcctgtgattaatagctccgagaggtaggagcggtgttgcaggcaccaaaccccgtccaacattggcgaaggatgtctacc

SEQ ID NO: 1591 - RNA, 122 nt, synthetic construct
  source 1..122: mol_type = other RNA; note = tracrRNA
ataggcacttcagaatgctccacaagttctgaaccctgcggtaagtgtttaaacatctctaagggtaggagaagtgatacttacatacaaacccttcttaacattggcgatgtgggtctact

SEQ ID NO: 1592 - RNA, 124 nt, synthetic construct
  source 1..124: mol_type = other RNA; note = tracrRNA
ataggcaccaagggatagcacctcagtcccttgcgctgcgggtggtggttaaataggtcgattgggaaggccagtgctgccaacacacaaaccttcggagaacattgacgaggggaaccttacc

SEQ ID NO: 1593 - RNA, 114 nt, synthetic construct
  source 1..114: mol_type = other RNA; note = tracrRNA
aacacctttaaatgttaatccagtttgaagccctgttgtttatctttaatagtggaaacacgaaagtgagataagcgcaaaaagcctttttaacaacgccaaggattacttcac

SEQ ID NO: 1594 - RNA, 125 nt, synthetic construct
  source 1..125: mol_type = other RNA; note = tracrRNA
caagacacctgggatgcgtgcccaagttccaggctccgtcgtcggcggttaaacagctctgagggggtaggagcagtgccgtcgatgtaaaaagcctttctaacattggcgatgggcaatttact

SEQ ID NO: 1595 - RNA, 123 nt, synthetic construct
  source 1..123: mol_type = other RNA; note = tracrRNA
atagacaccttggggtgcttctccagctccaagctctgtggtaagtgattaaacagtacaatagcttagaaggcagtgttgcttacaaaaaccgtggaataacattgactaggagaccgttac

SEQ ID NO: 1596 - DNA, 28 bp, synthetic construct
  source 1..28: mol_type = other DNA
tcatcaaaaagagtgaacgagactagaa

SEQ ID NO: 1597 - DNA, 30 bp, synthetic construct
  source 1..30: mol_type = other DNA
tcatcaaaaagagtgaacgcgagactagaa

SEQ ID NO: 1598 - DNA, 31 bp, synthetic construct
  source 1..31: mol_type = other DNA
tcatcaaaaagagtgaacgacgagcatagaa

SEQ ID NO: 1599 - DNA, 32 bp, synthetic construct
  source 1..32: mol_type = other DNA
tcatcaaaaagagtgaacgaacgagactagaa

SEQ ID NO: 1600 - DNA, 15 bp, synthetic construct
  source 1..15: mol_type = other DNA
tcatcgagactagaa

SEQ ID NO: 1601 - DNA, 20 bp, synthetic construct
  source 1..20: mol_type = other DNA
tcatcaaaacgagactagaa

SEQ ID NO: 1602 - DNA, 22 bp, synthetic construct
  source 1..22: mol_type = other DNA
tcatcaaaaagagagactagaa

SEQ ID NO: 1603 - DNA, 27 bp, synthetic construct
  source 1..27: mol_type = other DNA
tcatcaaaaagagtgacgagactagaa

SEQ ID NO: 1604 - DNA, 17 bp, synthetic construct
  source 1..17: mol_type = other DNA
tcatcacgagactagaa

SEQ ID NO: 1605 - DNA, 10 bp, synthetic construct
  source 1..10: mol_type = other DNA; note = Non-target strand
ttgagctgat

SEQ ID NO: 1606 - DNA, 32 bp, synthetic construct
  source 1..32: mol_type = other DNA; note = Target strand
cggaataatttactgaagagaactcgacttag

SEQ ID NO: 1607 - RNA, 22 nt, synthetic construct
  source 1..22: mol_type = other RNA
gggccttattaaatgacttctc

SEQ ID NO: 1608 - RNA, 262 nt, synthetic construct
  source 1..262: mol_type = other RNA
gtcaaccacccctgactgaagtcagaggcttgcttctggcctgagttgggggcccggtttggcggggccgggggcaactggctgaccaggcggcccggttcgccgggcaggggtccgcggggctaccaaggacttccgggtgtttcgccagcccggactatctccggcagaaccgctcaatgccgcggccggccaagaccggcctaagccctgcggacagcgccgaggcgacaatcactccgaaaggaggccgtgtatcggc

1. A non-naturally occurring, engineered composition comprising:
a) an IsrB polypeptide comprising a split Ruv-C nuclease domain comprising RuvC-I, RuvC-II, and RuvC-III subdomains, and
b) one or more ωRNA molecules, wherein each ωRNA molecule comprises a scaffold and a reprogrammable spacer sequence (e.g., comprising a spacer of 10 nucleotides to 150 nucleotides in length, preferably 12 to 50 nt, more preferably 15 and 45 nt in length), wherein each ωRNA molecule forms a complex with the IsrB polypeptide and directs sequence-specific binding of the complex to a target sequence on a target polynucleotide.

2. The composition of claim 1, wherein:
the IsrB polypeptide comprises a PLMP domain and optionally a conserved C-terminal Y domain;
the IsrB polypeptide does not comprise a HNH domain;
the IsrB polypeptide further comprises a bridge helix domain and optionally the bridge helix domain is located between the RuvC-I and RuvC-II subdomains;
the IsrB polypeptide comprises about 170 to about 700 amino acids; and/or
the IsrB polypeptide is catalytically inactive (“dIsrB”), optionally selected from Table X.

3-7. (canceled)

8. The composition of claim 1, wherein the ωRNA further comprises one or more chemical modifications; and/or wherein the complex recognizes a target adjacent motif (TAM) sequence 3′ of the target polynucleotide.

9. (canceled)

10. The composition of claim 1, comprising at least two ωRNA molecules, wherein the at least two ωRNA molecules target opposite stands of a double-stranded target polynucleotide, and wherein the complex comprises a nick on opposite stands either side of the target sequence; and/or further comprising a homologous recombination donor template comprising a donor sequence for insertion into the target polynucleotide.

11. (canceled)

12. (canceled)

13. A polynucleotide encoding the IsrB polypeptide and/or the ωRNA of claim 1.

14. A vector system comprising one or more vectors encoding the IsrB polypeptide and the ωRNA molecule of claim 1.

15. An isolated cell, or progeny thereof, comprising the composition of claim 1.

16. A method of contacting a target polynucleotide sequence in a cell, comprising introducing to the cell the composition of claim 1, and optionally, wherein the IsrB polypeptide and/or one or more nucleic acid components thereof are provided via one or more polynucleotides encoding the polypeptides and/or nucleic acid component(s), and wherein the one or more polynucleotides are operably configured to express the IsrB polypeptide and/or the ωRNA molecule,
and optionally wherein contacting comprises cleaving a DNA polynucleotide; or contacting results in modification of a gene product or modification of an amount or expression of a gene product.

17-19. (canceled)

20. An engineered, non-naturally occurring composition comprising:
a. a IsrB polypeptide, wherein the IsrB polypeptide is catalytically inactive,
b. a nucleotide deaminase (e.g., adenosine deaminase or a cytidine deaminase) associated with or otherwise capable of forming a complex with the IsrB polypeptide, and
c. an ωRNA molecule capable of forming a complex with the IsrB polypeptide and directing site-specific binding at a target sequence.

21. (canceled)

22. One or more polynucleotides encoding one or more components of the composition of claim 20.

23. One or more vectors encoding the one or more polynucleotides of claim 22.

24. A cell or progeny thereof genetically engineered to express one or more components of the composition of claim 20.

25. A method of editing nucleic acids in target polynucleotides comprising delivering the composition of claim 20 to a cell or population of cells comprising target polynucleotides,
and optionally, wherein the target polynucleotides are target sequences within genomic DNA; and/or wherein the target polynucleotide is edited at one or more bases to introduce a G→A or C→T mutation.

26. (canceled)

27. (canceled)

28. An isolated cell or progeny thereof comprising one or more base edits made using the method of claim 25.

29. An engineered, non-naturally occurring composition comprising:
a. a IsrB polypeptide, wherein the IsrB polypeptide catalytically inactive,
b. a reverse transcriptase associated with or otherwise capable of forming a complex with the IsrB polypeptide, and
c. ωRNA molecule capable of forming a complex with the IsrB polypeptide and directing site-specific binding of the complex to a target sequence of a target polynucleotide, and further comprising a donor template encoding a donor sequence for insertion into the target polynucleotide.

30. One or more polynucleotides encoding one or more components of the composition of claim 29.

31. One or more vectors encoding the one or more polynucleotides of claim 30.

32. A method of modifying target polynucleotides comprising
delivering the composition of claim 29 to a cell or population of cells comprising the target polynucleotides, wherein the complex directs the reverse transcriptase to the target sequence and the reverse transcriptase facilitates insertion of the donor sequence from the ωRNA molecule into the target polynucleotide; and optionally wherein insertion of the donor sequence:
a. introduces one or more base edits;
b. corrects or introduces a premature stop codon;
c. disrupts a splice site;
d. inserts or restores a splice site;
e. inserts a gene or gene fragment at one or both alleles of the target polynucleotide; or;
f. a combination thereof.

33. (canceled)

34. An isolated cell or progeny thereof comprising modifying the isolated cell or progeny thereof using the method of claim 32.

35. An engineered, non-naturally occurring composition comprising:
a. a catalytically inactive IsrB polypeptide;
b a non-LTR retrotransposon protein or integrase associated with or otherwise capable of forming a complex with the catalytically inactive IsrB polypeptide;
c. ωRNA molecule capable of forming a complex with the IsrB polypeptide and directing site-specific binding to a target sequence of a target polynucleotide; and
d. a donor construct comprising a donor polynucleotide for insertion to the target polynucleotide and located between two binding elements capable of forming a complex with the non-LTR retrotransposon protein or integrase,
and, optionally, wherein the catalytically inactive IsrB polypeptide is fused to an N-terminus of the non-LTR retrotransposon protein or integrase; and/or wherein the catalytically inactive IsrB polypeptide has nickase activity,
and optionally, wherein the donor polynucleotide further comprises a polymerase processing element to facilitate 3′ end processing of the donor polynucleotide sequence; or wherein the donor polynucleotide further comprises a homology region to the target sequence on a 5′ end of the donor construct, a 3′ end of the donor construct, or both.

36-39. (canceled)

37. (canceled)

39. (canceled)

40. One or more polynucleotides encoding one or more components of the composition of claim 35.

41. One or more vectors comprising the one or more polynucleotides of claim 40.

42. A method of modifying target polynucleotides comprising
delivering the composition of claim 35 to a cell or population of cells comprising the target polynucleotides, wherein the complex directs the non-LTR retrotransposon protein to the target sequence and the non-LTR retrotransposon protein facilitates insertion of the donor polynucleotide sequence from the donor construct into the target polynucleotide, and optionally, wherein insertion of the donor sequence:
a. introduces one or more base edits;
b. corrects or introduces a premature stop codon;
c. disrupts a splice site;
d. inserts or restores a splice site;
e. inserts a gene or gene fragment at one or both alleles of the target polynucleotide; or;
f. a combination thereof.

43. (canceled)

44. An isolated cell or progeny thereof comprising modifying the isolated cell or progeny thereof using the method of claim 42.

45. (canceled)

46. An engineered, non-naturally occurring composition comprising:
a. the IsrB polypeptide of claim 1,
b. a non-LTR retrotransposon protein or integrase associated with or otherwise capable of forming a complex with the IsrB polypeptide;
c. a ωRNA molecule capable of forming a complex with the IsrB polypeptide and directing site-specific binding to a target sequence of a target polynucleotide; and
d. a donor construct comprising a donor polynucleotide for insertion to the target polynucleotide and located between two binding elements capable of forming a complex with the non-LTR retrotransposon protein or integrase,
and optionally, wherein the IsrB protein is fused to an N-terminus of the non-LTR retrotransposon protein or integrase; and/or wherein the IsrB protein has nickase activity,
and optionally, wherein the donor polynucleotide further comprises a polymerase processing element to facilitate 3′ end processing of the donor polynucleotide sequence; or
wherein the donor polynucleotide further comprises a homology region to the target sequence on a 5′ end of the donor construct, a 3′ end of the donor construct, or both.

47-50. (canceled)

51. One or more polynucleotides encoding one or more components of the composition of claim 35.

52. One or more vectors comprising the one or more polynucleotides of claim 51.

53. A method of modifying target polynucleotides comprising
delivering the composition of claim 35 to a cell or population of cells comprising the target polynucleotides, wherein the complex directs the non-LTR retrotransposon protein to the target sequence and the non-LTR retrotransposon protein facilitates insertion of the donor polynucleotide sequence from the donor construct into the target polynucleotide, and optionally, wherein insertion of the donor sequence:
a. introduces one or more base edits;
b. corrects or introduces a premature stop codon;
c. disrupts a splice site;
d. inserts or restores a splice site;
e. inserts a gene or gene fragment at one or both alleles of the target polynucleotide; or;
f. a combination thereof.

54. (canceled)

55. An isolated cell or progeny thereof comprising modifying the isolated cell or progeny thereof using the method of claim 53.
